United States Patent Application Publication US 2005/0196754 A1 - sequence listing, part 21

SEQ ID NO: 59149 - protein, 1054 aa, Homo sapiens
  DOMAIN (395)..(449): ATP synthase c subunit proteins domain identified by eMATRIX, accession number BL00605, p-value=2.800e-29, raw score of 27.67
  DOMAIN (435)..(948): Hsp70 protein domain identified by PFam, accession name HSP70, E-value=1e-170, PFam score of 580.6
IVLSLTVSCRYIWWRYTYTLNWDNPVSLVCGLFMLFAETYAWIVLVLGYFQTPFLARATRKCAFEPGSVPSCCAHVRCWPCTNANIMSLGGIAIAVGAMVDAAIVMIENAHKRLEEWQHQHPDATLDNKTRWQVITDASVEVGPALFISLLIITLSFIPIFTLEGQEGRLFGPLAFTKTYAMAGAALLAIVVIPILMGYWIRGKIPPESSNPLNRFLIRVYHPLLLKVLHWPKTTLLVAALSVLTVLWPLNKVGGEFLPQINEGDLLYMPSTLPGISAAEAASMLQKTDKLIMSVPEVARKNADCTSFSELVENFKKTLSHTDPMVSDDLGTSLPFIDIYFSTLDYQDTTVHKASPSWAGHVPEENAGAMTTCRWARTVMENLNMDLLYMAAAVMMGLAAIGAAIGIGILGGKFLEGAARQPDLIPLLRTQFFIVMGLVDAIPMIAGNHAEAFASGGFSGFYDAAGVIHFFLGRCVEVVQQINLTRVDQRFAVKAQLFDVGGFLQKSGFVVSVGIDDAARLAGLHVLRLLNEPTAAAIAYGLDSGQEGVIAVYDLGGGTFDISILRLSRGVFEVLATGGDSALGGDDFDHLLADYIREQAGIPDRSDNRVQRELLDAAIAAKIALSDADSVTVNVAGWQGEISREQFNELIAPLVKRTLLACRRALKDAGVEADEVLEVVMVGGSTRVPLVRERVGEFFGRPPLTSIDPDKVVAIGAAIQADILVGNKPDSQMLLLDVIPLSLGLETMGGLVEKVIPRNTTITVARAQDFTTFKDGQTAMSIHVMQGERELVQDCRSLARFALRGIPALPAGGAHIRVTFQVDADGLLSVTAMEKSTGVEASIQVKPSYGLTDSEIASMIKDSMSYAEQDVKARMLAEQKVKAARVLESLHGALAADAALLSAAERQVIDDAAAHLSEVAQGDDVDAIEQAIKNVDKQTQDFAARRMDQSVRRALKGHSVDEDLCPDGAVLEANSGETILDAALRNGIEIEHACEKSCACTTCHCIVREGFDSLAESSEQEDDMLDKAWGLEPESRLSCQARVNDEDLVVEIPG

SEQ ID NO: 59150 - protein, 87 aa, Homo sapiens
MVERQSEHRLNRRTVSADRGDIAVPARLLTPFAKIVRNTRRRQVCASANAPHRLTLVACQRKEEETALSCRLVCEADRNRTGDYFRS

SEQ ID NO: 59151 - protein, 312 aa, Homo sapiens
  DOMAIN (146)..(192): DEAD-box subfamily ATP-dependent helicases proteins domain identified by eMATRIX, accession number BL00039D, p-value=9.375e- 14, raw score of 21.67
  DOMAIN (124)..(190): Helicases conserved C-terminal domain identified by PFam, accession name helicase_C, E-value=3.5e-10, PFam score of 47.3
  misc_feature (1)...(312): Xaa = X or * as defined in Table 2
GSGSCYSALVKRKWSARSLRADRNGARRGAYVGRKFGHFGPGLAGFFSAHASNLCRRSDRAPAHYHQLLNFADPVDMMQXKRGMVFLLLMDQRQQRVDDWRRLPSLLSVWQSCGDSGRRAPGGRXFHWRFQATVFQALAEDLRRNLQIVVATVAFGMGINKPNVRFVVHFDIPRNIESYYQETGRAGRDGLPAEAMLFYDPADMAWLRRCLEEKPQGQLQDIERHKLNAMGAFAEAQTCRRLVLLNYFGEGRQEPCGNCDICLDPPKQYDGSTDAQIALSTIGRVNQRFGMGYVVEVIRVAAFLEPDYSHRP

SEQ ID NO: 59152 - protein, 687 aa, Homo sapiens
  DOMAIN (175)..(245): TonB dependent receptor C-terminal region domain identified by PFam, accession name TonB_boxC, E-value=5.1e-08, PFam score of 33.8
MPNNWSPELRGLGRLRFITNAFTRMRFCFPNGQLDMYSKESPEEAPAPLKPWFAIPGPVAEEYSIAFGHWASLEGKGRIRRDRRRIRRYRKFYTKLPPLQNLKAIAVRVLRISIVEFAEYRFPVIRLVIREMGVAFHFCVDMRQIQFLRFWQELFINATAANHHDFCPASLRITQYGERERRRSTGRIPGFMLWGARVAYDFGPQMADLNLAFGVKNIFDQDYFIRSYDDNNKGIYAGQPRTLYMQGWNVIMLAFIRFLFAGLLLVISHAFAATVQDEHGTFTLEKTPQRIVVLELSFADALAAVDVIPIGIADDNDAKRILPESTGGVVEKTLSTYLMKDGKLCDSTQMNETGGYCRWVAQMITFTASGCDKAEVSVTPNRHPITDKQLHDMVVRVDTSSMQPIDSTCRFHASQPQRNMAAAHQTNISGNEINSSCRAIRPKIEPNTVPPIRSKARGTTLPQNEIGPIITTMVTSGQNARYAAEKSFGGNYDRKLFAKLRKLRKSIADENADHRQRKCSALTALDAKLERFGKPFMALIRAHVMAMTKSSGTKTTFIIVGELLGWVVPHQPKPQSKCRLYFQDRFHNRIKDITLTTTPTLCGIAEYSECCISSSFEAAPQRPTFCLAPQYITAFHRRTLIHMISTFLTITPSSFPGALCCRCTAALTADTRARYRHIQRLVRAFKV

SEQ ID NO: 59153 - protein, 944 aa, Homo sapiens
  DOMAIN (632)..(684): ELEMENT TRANSPOSABLE INSERTION PROTEIN TRANSPOSITION DNA domain identified by eMATRIX, accession number PD02455C, p-value= 5.253e-11, raw score of 29.23
  DOMAIN (559)..(719): Integrase core domain identified by PFam, accession name rve, E-value=1.3e-25, PFam score of 92.6
MTKKLHIKTWGCQMNEYDSSKMADLLDATHGYQLTDVAEEADVLLLNTCSIREKAQEKVFHQLGRWKLLKEKNPDLIIGVGGCVASQEGEHIRQRAHYVDIIFGPQTLHRLPEMINSVRGDRSPVVDISFPEIEKFDRLPEPRAEGPTAFVSIMEGCNKYCTYCVVPYTRGEKLNQFITFTGRIQRTVMMFPIVNNAAARNNWATFGVTVPTFGLGIRPRGPRNLAQLANNAHCIRRSNNNVKVHFAFLDLPFSSFSVCTLGKYGYANGTASTVRQYSCTTYVLVRFTSVDAEVNSYVHAFYEFSSRQLFQQCDSFVDVVLFGCINFLADNTHALGQFSHFLVLHYQAHGTCSTFDGASHRFNVGTSHVGSFGLRDFLQLSAGNFTHFVFVRLTGTRLDTSRFFQQNCCRRGLGNESERTVSVNGDYYRNRQTFFDGISFCVERFAEFHDVYALLTQSRTYWRTRLHVLLRRTDTGWMAAAVVTTDDTDVLLRIHHVIGELPRYGYRRVWALLRRQAELDGMPAINAKRVYRIMRQNALLLERKPAVPPSKRAHTGRVAVKESNQRWCSDGFEFCCDNGERLRVTFALDCCDREALHWAVTTGGFNSETVQDVMLGAVERRFGNDLPSSPVEWLTDNGSCYRANETRQFARMLGLEPKNTAVRSPESNGIAESFVKTIKRDYISIMPKPDGLTAAKNLAEALEHCNEWRDRHESYDMITILARRELPEDKDAMGTRIPDIRYSLSDRIRYYWPHSRIKNSVETMMVNLEGVDIPLGMISQYLPKQFERIQSGELSAIPHQLIMDKIYDVLRAYRYGYQVDQLQANGVAAACLNSTQTREQQLEVMTGCRTGQIRLLYIAPERLMLDNFLEHLAHWNPVLLAVDEAHCISQWGHDFRPEYAALGQLRQRFPTLPFMALTATADDTTRQDIVGIPKRRLFMPITRW

SEQ ID NO: 59154 - protein, 835 aa, Homo sapiens
  DOMAIN (125)..(141): Prokaryotic molybdopterin oxidoreductases proteins domain identified by eMATRIX, accession number BL00551A, p-value=5.500e- 18, raw score of 17.41
  DOMAIN (702)..(789): D-ala-D-ala dipeptidase domain identified by PFam, accession name Peptidase_M45, E-value=2.4e-54, PFam score of 194.0
MKIHTTEALMKAEISRRSLMKTSALGSLALASSAFTLPFSQMVRAAEAPVEEKAVWSSCTVNCGSRCLLRLHVKDDTVYWVESDTTGDDVYGNHQVRACLRGRSIRRRMNHPDRLKYPMKRVGKRGEGKFERISWDEALDTISDNLRRILKDYGNEAVHVLYGTGVDGGNITNSNVPYRLMNSCGGFLSRYGSYTTLIKSASDIGIIRLLYIAPERLMLDNFLEHLAHWNPVLLAVDEAHCISQWGHDFRPEYAALGQLRQRFPTLPFMALTATADDTTRQDIVRLLGLNDPLIQISSFDRPNIRYMLMEKFKPLDQLMRYVQEQRGKSGIIYCNSRAKVEDTAARLQSKGISAAAYHAGLENNVRADVQEKFQRDDLQIVVATVAFGMGINKPNVRFVVHFDIPRNIESYYQETGRAGRDGLPAEAMLFYDPADMAWLRRCLEEKPQGQLQDIERHKLNAMGAFAEAQTCRRLVLLNYFGEGRQEPCGNCDICLDPPKQYDGSTDAQIALSTIGRVNQRFGMGYVVEVIRGANNQRIRDYGHDKLKVYGMGRDKSHEHWVSVIRQLIHLGLVTQNIAQHFALQLTEAARPVMRGESSLQLPVPRIVALKPKTMQKSLGGNYDRKLFAKLRKLRKSIADESNVPPYVVFNDATLIEMAEQMPITASEMLSVNGVGMRKLERFGKPFMALIRAHVDGDDEEYRGTAIDLTLRDEHGNILDMGAGFDEMHERSHAYHPSVPPAAQRNRLLLNAIMTGGGFVGISSEWWHFELPQAASYPLLADQFSCFISPGTQHAADPQTLDPAVTIDNNDWTVTYPSYQRLVQYKTDRDKSSTGR

SEQ ID NO: 59155 - protein, 117 aa, Homo sapiens
  DOMAIN (36)..(68): ABC transporters family proteins domain identified by eMATRIX, accession number BL00211B, p-value=5.500e-17, raw score of 13.37
  DOMAIN (1)..(112): ABC transporter domain identified by PFam, accession name ABC_tran, E-value=5e-08, PFam score of 34.3
MGVVRTFQQSEALDRAATWLERIGLLEHANRQASNLAYGDQRRLEIARCMVTQPEILMLDEPAAGLNPKETKELDELIAELRNHHNTTILLIEHDMKLVMGISDRIYVVNQGRRWQT

SEQ ID NO: 59156 - protein, 103 aa, Homo sapiens
  misc_feature (1)...(103): Xaa = X or * as defined in Table 2
ISGVFFACFTNGSNGXLAHCHAFXPLLGDFGCRNGVIQGRENAHLMNGGGRRVTALHFQQYRFHHLFNILTARHHLIDNANHAQIDRXRFAFMRLAGGTATHQ

SEQ ID NO: 59157 - protein, 474 aa, Homo sapiens; identical to SEQ ID NO: 47959
  DOMAIN (78)..(122): Delta-aminolevulinic acid dehydratase proteins domain identified by eMATRIX, accession number BL00169F, p-value=6.657e- 38, raw score of 18.30
  DOMAIN (6)..(132): Delta-aminolevulinic acid dehydratase domain identified by PFam, accession name ALAD, E-value=1e-83, PFam score of 291.5

SEQ ID NO: 59158 - protein, 287 aa, Homo sapiens
  DOMAIN (160)..(208): Intermediate filaments proteins domain identified by eMATRIX, accession number BL00226B, p-value=3.407e-09, raw score of 23.86
MKLNFKGFFKAAGLFPLALMLSGCISYALVSHTAKGSSGKYQSQSDTITGLSHAKDSNGTKGYVFVGESLDYLITDGADDIVKMLNDPALNRHNIEVGDDARFVLNAGKNKFTGTISLYYYWNNQGRERKSQKDISETLGNNGVGFQTQPNNEVSAKHELEEQVKKLSHDTYSLQLMAALLENECQILQQRVEILKELHHQKQGTLQEKPIQINYKQDKKNQKPSEAKKVEMYKQNKQAMKGTFWKKDRSCRSLDVCLNKKACNTQFNIHVARKALRGKMRSASSLR

SEQ ID NO: 59159 - protein, 804 aa, Homo sapiens
  DOMAIN (643)..(671): NADH dehydrogenases domain identified by PFam, accession name NADHdh, E-value=4.8e-07, PFam score of 28.7
MERPGGPFKEPMGNAGFPRGGCQVNGSASIDSELGTERVSDTAHGLGARDDAMGMQYLIPGWTFDNKIDADNTAVLPAINVGADCITTDPSDAKLELDADKLTAALKKDASGVGALIVGDGKKTGITTTIGSNLTSWLSTTGIIKAATDGVSKTLNKLTKDYNAASDRIDAQVARYKEQFTQLDVLMTSLNSTSSYLTQQFENNSNSKQVMYAAKGTQAYAQIGVESAVMSASQQQLVTMLFDGVLSALVRASLFMQDNNQQGKGVSLSKAINIIENGLRGDEVEADKTLHIAQNGTVVAEGDYGFRLTTAPGNGLYVNYGLKALNIHGGQKLTLAEHGGAYGATADMSAKIGGEGDLAINTVRQVSLSNGQNDYQGATYVQMGTLRTDADGALGNTRELNISNAAIVDLNGSTQTVETFTGQMGSTVLFKEGALTVNKVGPETLKRDPPVRAMTIPATAAVYKPYWGATPLPIANAIASGIAIIPTVIPAIRSRRNGIADNDFINYRVTQVVRRVAREDRVSRVRKYTFSTTLLSELQQLYTAYRQCRSYHRPVRSHDLQLNLLIIKDNQIVYRKAWGAAKKYDGSVLMEQPVKATTGTLYDLASNTKMYATNFALQKLMSEGKLHPDDRIAKYIPGFADMVVTCGPFMSFGERRLLGLFQNRYGPNRVGYTICRQEGPGTRIPAPFPNKFGARPLEIGPNHWQFENTEDYVRQAVEEPHQRGANQVRYATARSVFKWDGTDTVKVGSDETPVRVLDEEVSTDQARWHNRYWIDSEGQIRQSEQYLGADYFPVKTTLIKAAKQ

SEQ ID NO: 59160 - protein, 29 aa, Homo sapiens
YPAPPAQKDADPRRTSLPALHGRVQRGDH

SEQ ID NO: 59161 - protein, 405 aa, Homo sapiens
  DOMAIN (73)..(91): Class II Aldolases and Adducin N-terminal domain proteins domain identified by eMATRIX, accession number PF00596D, p-value= 7.088e-13, raw score of 13.89
  DOMAIN (142)..(201): Iron-containing alcohol dehydrogenases domain identified by PFam, accession name Fe-ADH, E-value=2e-22, PFam score of 81.5
MAAYQSRPNANAVVHNHAVHCTAVSILNRSIPAIHYMIAAAGGNSIPCAPYATFGTRELSEHVALALKNRKATLLQHHGLIACEVNLEKALWLAHEVEVLAQLYLTTLAITDPVPVLSDEEIAVVLEKFKTYGLRIEEMILNETAWFGRGAVGALTDEVKRRGYQKALIVTDKTLVQCGVVAKVTDKMDAAGLAWAIYDGVWGFCFSQVKILGVLATRGLDVGQSLEPRNPTLQRTLNGPLRSSMGHQEPFTFDYEHLHSAPEGKHIPTARPRSLIDGKRMDKVIWGPNWEELWANYPTNSDRLNDFESSNIQTKEGKEWSQISSLQTGTVMTREDSGLTGAFSGFKEITEVQHLGGVWHGAASPCDEITDMSHCAWTQQALKAARIGNPWTPRKEDPECGHLIL

SEQ ID NO: 59162 - protein, 559 aa, Homo sapiens
  DOMAIN (54)..(80): Class II Aldolases and Adducin N-terminal domain proteins domain identified by eMATRIX, accession number PF00596C, p-value= 7.923e-22, raw score of 17.24
  DOMAIN (203)..(445): Iron-containing alcohol dehydrogenases domain identified by PFam, accession name Fe-ADH, E-value=6.9e-122, PFam score of 418.3
MTRLGLNQGTAGNVSVRYQDGMLITPTGIPYEKLTESHIVFIDGNGKHEEGKLPSSEWRFHMAAYQSRPDANAVVHNHAVHCTAVSILNRSIPAIHYMIAAAGGNSIPCAPYATFGTRELSEHVALALKNRKATLLQHHGLIACEVNLEKALWLAHEVEVLAQLYLTTLAITDPVPVLSDEEIAVVLEKFKTYGLRIEEMILNETAWFGRGAVGALTDEVKRRGYQKALIVTDKTLVQCGVVAKVTDKMDAAGLAWAIYDGVVPNPTITVVKEGLGVFQNSGADYLIAIGGGSPQDTCKAIGIISNNPEFADVRSLEGLSPTNKPSVPILAIPTTAGTAAEVTINYVITDEEKRRKFVCVDPHDIPQVAFIDADMMDGMPPALKAATGVDALTHAIEGYITRGAWALTDALHIKAIEIIAGALRGSVAGDKDAGEEMALGQYVAGYTYVPSFGTTLDEYVRRTRTVVRYFDVCVTIVVLILCSCMLLVTLEDPLEANWPSALGSQPEQMCMHLEGLFEDIWGPSCCPFRESQGLTPDKDKFQAQDRPLLKVQHHHACQS

SEQ ID NO: 59163 - protein, 1558 aa, Homo sapiens
  DOMAIN (240)..(286): SRP54-type proteins GTP-binding domain proteins domain identified by eMATRIX, accession number BL00300B, p-value=7.231e- 26, raw score of 20.56
  DOMAIN (171)..(288): SRP54-type protein domain identified by PFam, accession name SRP54, E-value=1.2e-45, PFam score of 163.8
MLHLPVSYAPIDVWWDEHGRPGTGCLNTKGSQQQHRHDSTTQHIHLQLLVIRVKTTTTNNSQQTPQYPCQQYHTDSRQHRQQNRMVCQRIPHALEPRQMTYAVDTGLADHRDRTEHGGAFAAIVQNAESVLCSSPKKTPVENRSDRKTDQEVFRAPERSLLKPKRISVPDLSACSAELEEQLLIADVGVETTRKIITNLTEGASRKQLRDAEALYGLLKEEMGEILAKVDEPLNVEGKAPFVILMVGVNGVGKTTTIGKLARQFEQQGKSVMLAAGDTFRAAAVEQLQMRHLRAIRTVQVIQQLIERITLANEAAGIGIWEWELKPNIFSWDKRMFELYEIPPHIKPNWQVWYECVLPEDRQHAEKVIRDSLQSRSPFKLEFRITVKDGIRHIRALANRVLNKEGEVERLLGINMDMTEVKQLNEALFQEKERLHITLDSIGEAVVCIDMAMKITFMNPVAEKMSGWTQEEALGVPLLTVLHITFGDNGPLMENIYSADTSRSAIEQDVVLHCSSVMHFQRAVNHVFVSQNRQRRGQPLQSQGIFTDPQSYITYATALAYRGEKAKLKTAEHVGGFLTYKVTDYISGIAKRTMLISGCGHTPSTSTNSAEISTTIPPALYCQFDEADCRTDNHGTHQPPQVCLDTDRQHVELTDKAQRHRDTGQRQHHHRHHCREDRTMPEQTAVREQGISIRATIRAGHQADHAERAEAAEQITGQNIAVARAGDIVSARFGIPWNATIRIGICIRCPSGKSSHMRGVTIFRCVSPTIWNLEAFQFLSECILSKAVTDDEYDDENDDHDDDDDDDDDDDDDDDEMMGCDMGIEYMNYHPPARTTPDMDPELRAFLDFNSTHMEPWDGPAGIVMSDGRFAACNLDRNGLRPARYVITKDKLITCASEVGIWDYQPDEVVEKGRVGPGELMVIDTRSGRILHSAETDDDLKSRHPYKEWMEKNVRRLVPFEDLPDEEVGSRELDDDTLASYQKQFNYSAEELDSVIRVLGENGQEAVGSMGDDTPFAVLSSQPRIIYDYFRQQFAQVTNPPIDPLREAHVMSLATRIGREMNVFCEAEGQAHRLSFKYADVLYSDFNNHDGGPQAANKYPTDCAIPESAAPDAQKPHAILPPHICANMQPLRRKIEPTGTYQRGIARYALPSLTTINLFRGVSATLVGLLRLMGILQHKALNYYKLSTRTSANRQWLSRSSSTSCNGVSSASVGRVTNANSQTILRQFTYFTCIPVHSLTAATLCCAGAYGPGNPLKAGCSSLERLMDINSLNPDGSPVGRVHFPSSLTVRDPLESPTAWQGAAENPAATAQALLSRTITMTIEKIFTPQDDAFYAVITHAAGPQGALPLTPQMLMESPSGNLFGMTQNAGMGWDANKLTGKEVLIIGTQGGIRAGDGRPIALGYHTGHWEIGMQMQAAAKEITRNGGIPFAAFVSDPCDGRSQGTHGMFDSLPYRNDAAIVFRRLIRSLPTRRAVIGVATCDKGLPATMIALAAMHDLPTILVPGGATLPPTVGEDAGKVQTIGAHFADHDSPGNLRGFSFSLVMISRHVLGSTGMTL

SEQ ID NO: 59164 - protein, 131 aa, Homo sapiens
MAASIVEYTPLFPPGYRTCTSRAYTVIQARPTAGLQRLRYLLLLWGADRNGANPMTPEEVHRVANERLMQMMPQTRWGQSYLNRQRGSLSRLRSIRRQEMQLLRLLRRHSLLLIALHKGLRRRKVVLNRLR

SEQ ID NO: 59165 - protein, 226 aa, Homo sapiens
  misc_feature (1)...(226): Xaa = X or * as defined in Table 2
NSRCVWNAEFGHQLIAGDHFFHHFQAHLVQFGGDFFQLFNLGEGQLVVSIFTPVRLAVHGVKIETVFVGFSSLIHGSQTVLVSSASGASVASTRGKCTIVTSGISGVIAKNDGLPRVHGATAPSCASQFLVFAAPTPRPDRHGXRTDDSTPQRLSSPAVEKAPTASSASGNSRNDKPLREITLITSDRPVPDAAVSPTGFWPLTIPFHRCRRMSSLPGIPIRQSSA

SEQ ID NO: 59166 - protein, 62 aa, Homo sapiens
  misc_feature (1)...(62): Xaa = X or * as defined in Table 2
AYGNPVEYSGRRAPGGRXFHWRFHGHGFPGAGGGSPAKPVNRRAAAPIDSAPAPAADGRVSR

SEQ ID NO: 59167 - protein, 366 aa, Homo sapiens
  DOMAIN (51)..(72): Dihydroxy-acid and 6-phosphogluconate dehydratases proteins domain identified by eMATRIX, accession number BL00886A, p-value= 5.821e-21, raw score of 17.11
  DOMAIN (34)..(360): Dehydratase family domain identified by PFam, accession name ILVD_EDD, E-value=6.7e-16, PFam score of 44.5
LTNQRVNRVGVVLRGRAKLTSRHGVSPSVNRRPITRNGGIPFAAFVSDPCDGRSQGTHGMFDSLPYRNDAAIVFRRLIRSLPTRRAVIGVATCDKGLPATMIALAAMHDLPTILVPGGATLPPTVGEDAGKVQTIGARFANHELSLQEAAELGCRACASPGGGCQFLGTAGTSQVVAEALGLALPHSALAPSGQAVWLEIARQSARAVSELDSRGIPPRKILLHKPLKPPCVSPRRWGAHQNFGWHLFGLSHRLACAEEVAAVFPRRVDNLHVGVEQPEFTVGVAQARRPDAAGVRVALHVQHRHAVQRGADQRPVFQVTGVVDAHAREPLEGRGGDVVVLALAAQGRVRVEAGEYRVSDFHIASG

SEQ ID NO: 59168 - protein, 190 aa, Homo sapiens
RTAEYRDWHITFRVFHYISIRTRRLQTKKSPQRHSDGRTYRTEERCMMRIPGINVQRRAKPEPANNAQTDDRNNDPPHGNATDLPGNARTTQVATGTITAPDGRRQFSTLGGLMFYLQFFFYAWGHARIPAQYDYISWMLHMSFYVLCGGIVGLVLKEWNNAGRRPVTVLSLGCVVIIVAANIVGIGMAN

SEQ ID NO: 59169 - protein, 51 aa, Homo sapiens
CCWAVCAGAMWLHHGAFHNKAPVFISPNSWEFGSRTKERARNDGQILYQFC

SEQ ID NO: 59170 - protein, 1008 aa, Homo sapiens
  DOMAIN (293)..(484): Transposase domain identified by PFam, accession name Transposase_18, E-value=9.7e-08, PFam score of -22.2
  misc_feature (1)...(1008): Xaa = X or * as defined in Table 2
MADTRYFGMHMSQETPASTTEAQIKNERRISPFWLLPFIALMIASWLIWDSYQDRGNTVTIDFMSADGIVPGRTPVRYQGVEVGTVQDISLSDDLRKIEVKVSIKSDMKDALREETQFWLVTPKASLAGVSGLDALVGGNYIGMMPGKGKEQDHFVALDTQPKYRLDNGDLMIHLQAPDLGSLNSGSLVYFRKIPVGKVYDYAINPNKQGVVIDVLIERRFTDLVKKGSRFWNVSGVDANVSISGAKVKLESLAALVNGAIAFDSPEESKPAEAEDTFGLYEDLAHSQRGVIIKLELPSGAGLTADSTPLMYQGLEVGQLTKLDLNPGGKVTGEMTVDPSVVTLLRENTRIELRNPKLSLSDANLSALLTGKTFELVPGDGEPRKEFVVVPGEKALLHEPDVLTLTLSAPDSYKDIAEKIQKQGGDYLFAVKGNQGRLNKAFEEKFPLKELNNPEHDSYAMSEKSHGREEIRLHIVCDVPDELIDFTFEWKGLKKLCVAVSFRSIIAEQKKEPEMTVRYYISSADLTAEKFATAIRNHWHVENKLHWRLDVVMNEDDCKIRRGNAAELFSGIRHIAINILTNDKQRNGEKCAANSHQRQKLRPDDFESGTPVEDGLREANKPSKSLDTDLSTYLGPESTDDTSAQSCIIKTVNILGYTQLPGKVPGLMRCGIDRFTLNIRLASGEDITLKIRRNIYREGIAYGVQSGIHLIGGDQLRGEKPRTKKAPGFPSRLATNSDRFDLNLHVFRQTGNFNARTCREGGVVSGEEGFASGFDDRFYVVQRLTCLCSDVCRYFARLRIYRDLTGGDDHIAQINALYYLALSAISLGRFGRQSWLQPVRHGVYVSVGAPGLWLRPGIGAGSPRWFAVGPGLGKLKKTVLTEFNRLRTAGKVAIKLVDGDELIGVDLTSGEDEVMLFSAEGKVVRFKESSVRAMGCNTTGVRGIRLGEGDKVVSLIVPRGDGAILTATQNGYGKXPLIPASLPCFVKIPASNYATRNYPLAMLISAPC

SEQ ID NO: 59171 - protein, 287 aa, Homo sapiens
  DOMAIN (14)..(27): bZIP transcription factors basic domain proteins domain identified by eMATRIX, accession number BL00036, p-value=7.750e-10, raw score of 9.02
  DOMAIN (107)..(267): Transposase domain identified by PFam, accession name Transposase_18, E-value=3.6e-11, PFam score of 27.5
YEERVLKKIRRKIRNKQSAQESRKKKKEYIDGLETRYTGPITLFSPMWKPVISSLNFRETGLEEFVEMVTFYVINRLRHYREEQVIDDVPQWLKSTVEKMHDKEQFSESALENMVALSAKSHLHDPESWRLGPSQRGIKPRARVRTETILQMIKTSLQLMEKRSGILMIRVAARGAIHVISAFSTMHSLVIGQIKTDEKSNEITAIPELLNMLDIKGKIITTDAMGCQKDIAEKIQKQGVIFSLCPASIIDDKKVTDLAVAVQGTLKTGSGGILPPGGALKKISEKL

SEQ ID NO: 59172 - protein, 110 aa, Homo sapiens
AIEPRHKNPNPGTYGHPNIRTAAWLPTNVKGRCRLWLAVMKRYLNVLNRCLNCSVKISPSWAVTAMVKPAKWQIRLSWRSILKRFLKPCYLASKAVLCWQLSSAPFSLPR

SEQ ID NO: 59173 - protein, 204 aa, Homo sapiens
LPAATQNFFLISPHALQPFATCWRIVTLAIHFPDRLPRQRFLLFQQCQTRSVIARRFQLAQLSGRFQQRTQQGFFHIACTNDPRGNAVDRGIEEVKADMHPVKQIVTHNLTGNCLGFIIQQHYVIAVPANRTADVQQQLRHIQHGGGNLVGNHFSRVEVPGVQAQRSLAAGGIPHVKLIGANRVALCANAKQFALNGVDMVRRV

SEQ ID NO: 59174 - protein, 538 aa, Homo sapiens
  DOMAIN (4)..(180): Transposase domain identified by PFam, accession name Transposase_18, E-value=2.5e-44, PFam score of 160.7
SNMVILKMVFLFTILLPELYPVSVLQNFTSCFINWMRDCHSSNDKDVIAIDGKTLRHSYDKSRRRGAIHVISAFSTMHSLVIGQIKTDKKSNEITAIPELLNMLDIKGKIITTDAMGCQKDIAEKIQKQGGDYLFAVKQRNGAVENRAKTQTRIAFGDHFFRRQVSQRIRLFCHRLATQFAARLRMFIATGQPMNGLRLLLFIVNKQAALLVNKLDAQMAAFQQLPGRGRQATVRREMDLCAFAERMGLPVSRPGDIQEFHAGCRTKFDAGAFRDKHHVACFGDHGLAFVANMQLPFQHHVDFVVVQGPREECVLPLHKTGGHAAAVVSGHKISQAHAMRLCAVETTKLDATGINHFDAAFAGHRFESSVDCACSATVSFITFPSVCDRFGNWLRSGRCSHAARKNEITLTNTRRSLRPKRNTERHDMQTRATVIAAGEKLLPYAETLMSTWQAARKEVAHTSRHNEFSIGASASLWDMVMTSAGAVVTTVVVAVRPSSFYILCSHKKKRTLHTKREKTVDRRKEYETRAKRSETDTQ

SEQ ID NO: 59175 - protein, 896 aa, Homo sapiens
  DOMAIN (226)..(280): NAD-dependent glycerol-3-phosphate dehydrogenase proteins domain identified by eMATRIX, accession number BL00957F, p-value= 2.688e-39, raw score of 32.17
  DOMAIN (1)..(157): Transposase domain identified by PFam, accession name Transposase_18, E-value=2.4e-58, PFam score of 207.3
MRDCHSSDDKDVIAIDGKSVSLALLMTRSRRRGAIHVISAFSTMHSLVIGQIKTDEKSNEITAIPELLNMLDIKGKIITTDAMGCQKDIAEKIQKQGGDYLFAVKGTQGRLNKAFEEKFPLKELNNPEHDSYAISEKSHGREEIRLHIVCDVPDELIDFTFEWKGLKKLCVAVSFRSIIAEQKKEPEMTVRYYISSADLTAEKFATAIRNHWHVENKLHWRLDVSRNRRFGMMLGQGMDVQSAQEKIGQVVEGYRNTKEVRELAHRFGVEMPITEEIYQHENLGSALSYMLANKLSSPIMPAIAIREVVEEAYAADPEMIASAACDIQAVRTRDPAVDKYSTPLLYLKGFHALQAYRIGHWLWNQGRRALAIFLQNQVSVTFQVDIHPAAKIGRGIMLDHATGIVVGETAVIENDVSILQSVTLGGTGKSGGDRHPKIREGVMIGAGAKIPGILTVGAGRRWRRFRVLQRCRAYHRPGVRSIAVTNAKPHDGPYKTLHLADEKLIRSLKPGAILINACRGAVVDNTALLTCLNEGQKLSVVLDVWEGEPELNVELLKKVDIGTSHIAGYTLEEYGRITLHGPLDQPTLNRLVHLVSDVRRDDAPLRNVAGIRLTGGRVSGTTFSDMRCACDGTVTCNTGKSANGTRSFSLSTRLPVFLFGAMWGIGNINYGLTMRYLGMSMGIGIAIGITLIVGTLMTPIINGNFDVLISTEGGRMTLLGVLVALIGVGIVTRAGQLKERKMGIKAEEFNLKKGLVLAVMCGIFSAGMSFAMNAAKPMHEAAAALGVDPLGSCPPQKPDFSLAKSLIIHNVLLSTLGGLMWYLQFFFYAWGHARIPAQYDYISWMLHMSFYVLCGGIVGLVLKEWNNAGRRPVTVLSLGCVVIIVAANIVGIGMAN

SEQ ID NO: 59176 - protein, 126 aa, Homo sapiens
  misc_feature (1)...(126): Xaa = X or * as defined in Table 2
FLQPFPFKREINKFIRDIANNMKTDFFSAVTLFTDCVTVMLWIIXFFQRKFFLKGFIXPPLGSFYREXIITSLFLYLLCNIFLATHRISCDDFSFNIQHVKKFWDSCNLIRFLIRLDLSDDQTVHC

SEQ ID NO: 59177 - protein, 420 aa, Homo sapiens
  DOMAIN (245)..(408): Dienelactone hydrolase family domain identified by PFam, accession name DLH, E-value=1.3e-70, PFam score of 248.0
MAALPCRLILPHHLTDQFVAWQERSSLSQPSPRHTQLRLPTLHPRSPNPGILHCQPSASSPATDDTRPTTPTERSPCTGLDHDSTCHPALHRPQLVTPVSAAACTVVRSLYPLTEIFHLPRLGIQRCEVQARAIQTDRRRGNQDITHINMRLNSARVPIRRKVRMPSCASSSTAIEVDGPPIPVEQTITGLPSSSARQGTENTMATTQQSGFAPAASPLASTIVQTPDDAIVAGFTSIPSQGDNMPAYHARPKQSDGPLPVVIVVQEIFGVHEHIRDICRRLALEGYLAIAPELYFREGDPNDFADIPTLLSGLVAKVPDSQVLADLDHVASWASRNGGDVHRLMITGFCWGGRITWLYAAHYPQLKAAVAWYGKLTGDKSLNSPKQPVDIATDLKAPNLGLYGGQDTAFRKRALNHGQR

SEQ ID NO: 59178 - protein, 68 aa, Homo sapiens
  misc_feature (1)...(68): Xaa = X or * as defined in Table 2
KGYSRRSGKHRQGCCNVLRLRFPDHQTAPRPMPLKRQTRAPGQSPPGLPADPHPGQFXLPLLRGRFAR

SEQ ID NO: 59179 - protein, 345 aa, Homo sapiens
  DOMAIN (110)..(150): CoA transferases proteins domain identified by eMATRIX, accession number BL01273C, p-value=6.917e-10, raw score of 12.54
  DOMAIN (13)..(254): Coenzyme A transferase domain identified by PFam, accession name CoA_trans, E-value=0.0017, PFam score of -59.0
MKPVKPPRINGRVPVLSAQEAVNYIPDEATLCVLGAGGGILEATTLITALADKYKQTQTPRNLSIISPTGLGDRADRGISPLAQEGLVKWALCGHWGQSPRISELAEQNKIIAYNYPQGVLTQTLRAAAAHQPGIISDIGIGTFVDPRQQGGKLNEVTKEDLIKLVEFDNKEYLYYKAIAPDIAFIRATTCDSEGYATFENEVMYLDALVIAQAVHNNGGIVMMQVQKMVKKATLHPKSVRIPGYLVDIVVVDPDQTQLYGGAPVNRFISGDFTLDDSTKLSLPLNQRKLVARRALFEMRKGAVGNVGVGIADGIGLVAREEGCADAFILTVETGPIGGITSQGS

SEQ ID NO: 59180 - protein, 148 aa, Homo sapiens
  misc_feature (1)...(148): Xaa = X or * as defined in Table 2
LMVSGFLTSPKDHERIMSGEARAILIASNSSVLVCAFRNFNKSFTDLLPSELAQSASERISFNNTLKDSGMPGSIXWLPSTMFLYILVRPFTSSDLTVSISCRVYAAPYASSAHTSISPKRXPPNTQRLLTGPVGTFWGRKPPLFPTP

SEQ ID NO: 59181 - protein, 693 aa, Homo sapiens; identical to SEQ ID NO: 56103
  DOMAIN (507)..(557): RNA polymerases beta chain proteins domain identified by eMATRIX, accession number BL01166H, p-value=7.158e-13, raw score of 19.05
  DOMAIN (535)..(581): RNA polymerase beta subunit domain identified by PFam, accession name RNA_pol_B, E-value=6.2e-36, PFam score of 130.6

SEQ ID NO: 59182 - protein, 522 aa, Homo sapiens
  DOMAIN (101)..(151): RNA polymerases beta chain proteins domain identified by eMATRIX, accession number BL01166H, p-value=1.000e-40, raw score of 19.05
  DOMAIN (44)..(175): RNA polymerase beta subunit domain identified by PFam, accession name RNA_pol_B, E-value=5.9e-86, PFam score of 299.0
MVEATLNSRTWVSTHVGAVLPYSCVNYGADVRQKVDLSTFSDEEVMRLAENLRKGMPIATPVFDGAKEAEIKELLKLGDLPTSGQIRLYDGRTGEQFERPVTVGYMYMLKLNHLVDDKMHARSTGSYSLVTQQPLGGKAQFGGQRFGEMEVWALEAYGAAYTLQEMLTVKSDDVNGRTKMYKNIVDGNHQMEPGMPESFNVLLKEIRSLGEGYATFEDEVMYLDALVIAQAVHNNGGIVMMQVQKMVKKATLHPKSVRIPGYLVDIVVVDPDQTQLYGGAPVNRFISGDFTLDDSTKLSLPLNQRKLVARRALFEMRKGAVGNVGVGIADGIGLVAREEGCADDFILTVETGPIGGITSQGIAFGANVNTRAILDMTSQFDFYHGGGLDVCYLCFAEVDQHGNVGVHKFNGKIMGTRGSLALEGYLAIAPELYFREGDPNDFADIPTLLSGLVAKVPESPGAGRSRIHVDSGAFSAKTLGLDWNYTTSFPGSPSCRRQIVRLLGLQNQGGETRGNLAPRWSR

SEQ ID NO: 59183 - protein, 151 aa, Homo sapiens
MKQMDTRGKVINCAFAVSAAFALGDHLGFAAANMNAMIFPMIVGKLIGGVTAIGVAMMLVPRYEFIKREISWQSPVFFTPVDKQGGLKEAELKTLILEQYHAAGIEPESVDSGAIIITGESAKTRNARPTVMALSQSLGDFVVASAGPHLE

SEQ ID NO: 59184 - protein, 259 aa, Homo sapiens
MMLNVKWGFTCTWALGSGPQAKILGKRINDWAPTKLGFPANNIPMFGMMNQMDTRGKFIFCAFAVSAAFALGDHLGFAAANMNAMIFPMIVGKLIGGVTAIGVAMMLVIFSRLELVNRAAVSQVPRYEFIKREISWQSPVFFTPVDKQGGLKEAELKTLILEQYHAAGIEPESVDSGAIIITGESAKTRNARPAGMALSQSLGDFVVARAGPHLESVNAGYRTRIRNHGHSWFPGEIGIRSQFPHTLRTGSINGKAWGA

SEQ ID NO: 59185 - protein, 477 aa, Homo sapiens
  DOMAIN (16)..(60): Aromatic amino acids permeases proteins domain identified by eMATRIX, accession number BL00594A, p-value=1.000e-40, raw score of 16.75
MATLTTTQTSPSLLGGVVIIGGTIIGAGMFSLPVVMSGAWFFWSMAALIFTWFCMLHSGLMILEANLNYRIGSSFDTITKDLLGKGWNVVNGISIAFVLYILTYAYISASGSILHHTFAEMSLNVPARAAGFGFALLVAFVVWLSSKAVSRYRELDSLDLTAKAIGIDIDPQAIQASRDNAERNGVSDRLELYLPKDQPEEMKADVVVANILAGPLRELAPLISVLPVSGGLLGLSGILASQAESVCEAYADSFALDPVVEKEEWCRITGHAFAVDMKPWKNVKIASIGILFAMIGVYAGLAEFGGYGTRWLAMISYFIAAVVIVYLIFDSWRHRHDPAATNMVGCYSGKPLNTQNIDSLAAEGIRFNSAYTCSPVCTPARAGLFTGIYANQSGPWTNNVAPGKNISTMGRYFKDAGYHTCYIGKWHLDGHDYFGTGECPPEWDADYWFDGANYLSELTEKEISLWRNGLTASAHST

SEQ ID NO: 59186 - protein, 187 aa, Homo sapiens
VDSRGYPYGSRGAGKCRESERLGSESRNPGSIGLENELTAEDVASADMVILTKDIGIKFEERFAGKTIVRVNISDAEFLMTNRISRLKTALFANTREISLERALLYTASHRQTEGEPVILRRAKATAYILEHVEISIRDEELIAGNRTVITARRDYVAGNGPLLAAERAGSIPDASAGPLCYQRRRL

SEQ ID NO: 59187 - protein, 1137 aa, Homo sapiens
  DOMAIN (538)..(586): Sodium:galactoside symporter family proteins domain identified by eMATRIX, accession number BL00872B, p-value=6.143e- 34, raw score of 26.61
  DOMAIN (406)..(648): Sodium:galactoside symporter family domain identified by PFam, accession name Na_Galacto_symp, E-value=2.1e-19, PFam score of 77.9
MEDLIKLRKNAVTSVRLMRNLSPVTAECCGEGGIKAWDYVRMGFLSRMGVLNNWLSEEESLWIQSRIHLRVLYVIIVTGGNTLPVIPYGRQYWQSPEDDHLPLLREFLARKEYERFQAKTDPQGFKQLRQAYEEALRIAQSPAKSVWQPEEYEVAEHEILLAFRALLASDSERFLPSAWQRFIQQLNYCSMEEIDELRWSLCTIAMNTAHLSFECVVLFSQETAETQRPDTISSVPALHYILMTWWIPVGYNKRDPRPTVGVIWALRTSDRFVDLLWDSFCRAGGTFYPPHDGTNSPSQTIRTRATGRFRWNLHAGNCAGTTGDTNTSSPARTVPTSCSCTPLLVAVAIFGGVHQSSVPTHYVGPGVIIASDPCTKRGHCNRFDPYYVQQGVSACLPAEEYAEIAGINWKRVTLTSLKIFTTVWRIVWNAGIWVKSTGATRKINSGRRLAIRFTMPMKRQRRRELLLIESNGCSHGGSRLGAVRIETRTSSLTPASWALKKLCNCDVRLLAVLNGLNSIAMIATLRFIISIFAPSHFYNWLMASDVVDYEESRSGRRLDGLVFSTYLFSLKIGLAIGGAVVGWILAYVNYSASSSVQPVEVLTTIKILFCVVPVVLYAGMFIMLSLYKLTDARVEAISRQLIKHRAAQGSAVSLGSTNMTIFHIHHSAGGFTRHFNFVGDDHLGNIRFCQLTNDADDLCRNFRVQCGGRFIEQQYLRFHHQRTGNSNTLLLTTRKMQRVTIAIRFETQTFQQVFCTGQSMIFNQPPVHGRSIELGGLKEAELKTLILEQYHAAGIEPESVDSGAIIITGESAKTRNARPAVMALSQSLGDFVVASAGPHLESVIAGHGAGAQTLSEQRLCRVLNIDIGGGTANYALFDAGKISGTACLNVGGRLLETDSHGRVVYAHKPGQMIVDECFGAGTDARSLTGAQLVQVLRPKSLRFLAAWANVIATRPANRSVCRYWAAAGTGLDDIRAWLNDVSSEQTVPPRIGGGNPLARTTMAKDTSAKCGEPMYRFGARRSVDKHASNPFRGHHQRQHQNDFLPDGQVNAIQLRDEDSGNTLIQRRTIKNCIRVRNIETKLVTGKVGTQHTQLLGNTLTGSTAAKGVGVLLAGLATSNNPLMTLKPNDNEFFPSKC

SEQ ID NO: 59188 - protein, 71 aa, Homo sapiens
  misc_feature (1)...(71): Xaa = X or * as defined in Table 2
MIMWLAAVAIREINHDSGSATFRTPRDPRTVAGKYNLGASLYKSELLAXLHSAGAGCLSCQRAKLGLGRRR

SEQ ID NO: 59189 - protein, 705 aa, Homo sapiens; identical to SEQ ID NO: 48643
  DOMAIN (16)..(60): Aromatic amino acids permeases proteins domain identified by eMATRIX, accession number BL00594A, p-value=1.000e-40, raw score of 16.75

SEQ ID NO: 59190 - protein, 49 aa, Homo sapiens
FPRKCCPACATDRPLPSVHGLVCSAAPPAPGNIYYSLSPHVIPGIAGYR

SEQ ID NO: 59191 - protein, 46 aa, Homo sapiens
  misc_feature (1)...(46): Xaa = X or * as defined in Table 2
RWSNGTLENGTLXLLTLPSASLISTNKSPLDDVEXRSLISKAPGDT

SEQ ID NO: 59192 - protein, 436 aa, Homo sapiens
KRQYHSLGSNAKSTGGWSIMTTFTNKDLIKEIKERISSLEVRDDIERRAYEIALVSLEVEPDEREAYELFMEKRFGDLVDRRRAKNGDNEYMAWDMTLGWIIWQQRAERIFISITLRKTPRWRMTGQNVLRSLKVLPLVIPRTRGNPQTGTPATDLDDDYFDMLQEELCSVVEASGASLEKGRHDQLLTALRALLLSRKNPFGDIKLDGTVQKALENLGLGEAAKRNVGTGANQIPDMGSFMLSASVPGYQKLPSGLIIQWGPIDVPLTSQDTVTYFPIAFPNRCPRVFATQDYTPGSANVGYIACAGYNQDPVKFISRAGGYRARVDRKFKEGRYLPRHYTLRAGRVAQQSGDGDGRTGMQGQVQDDIYQLWLQSQRRLLPMLIHRDEAMAECLAAKQPVGEYRSDALAAEEILTLANWCLLNYSGLKTPVGSAS

SEQ ID NO: 59193 - protein, 146 aa, Homo sapiens
  DOMAIN (1)..(89): Bacterial regulatory helix-turn-helix protei domain identified by PFam, accession name HTH_1, E-value=9e-14, PFam score of 58.4
MHTFEVAARHQSFALPAEELSLSPSAEILDIKNQELSGTLTLYSRPSIAQCWLVPALGDFTRRYPSISLTVLTGNDNVNLQRAGIDLAIYFDDAPSAQLTHHFLMDEEILPVCSPEYAQRHALTNTVINLCHCTLLHDRQAWSNDS

SEQ ID NO: 59194 - protein, 695 aa, Homo sapiens
  DOMAIN (531)..(567): Transketolase proteins domain identified by eMATRIX, accession number BL00801E, p-value=2.125e-33, raw score of 21.68
  DOMAIN (471)..(695): Transketolase domain identified by PFam, accession name transketolase, E-value=1.6e-155, PFam score of 530.1
TPRAERTASSVALPTSRLLRARAETTTAPSTPMKTHRVISMVFFTCSQTGTPSASPVKSSLKVSSLNIIIASTTNRPSVQQFWPVSPPGDGTRRYPSISLTVLTGNDNVNLLRAGIDLAIYFDDAPSAQLTHHFLMDEEILPVCSPEYAQRHALTDTVINLCHCTLLHDRQAWSNDSGTDEWHSWAQHYAVNLPTSSGIGFDRSDLAVIAAMNHIGVAMGRKRLVQKRLASGVYPPRCAYPRTHLLETSTTSGVNGVGTYSAPFWRMLLNSFVMAFSITLGKITVSMLSAFAIVWFRFPLRNLFFWMIFITLMLPVEVRIFPTVEVIANLQMLDSYAGLTLPLMASATATFLFRQFFMTLPDELVEAARIDGASPMRFFCDIVFPLSKTNLAALFVITFIYGWNQYLWPLLIITDVDLGTTVAGIKGMIATGEGTTEWNSVMVAMLLTLIPPVVIVLVMQRAFVRGLVDNPAANYIHYGVRESGMTAIANGIAHHGGFVPYTATFLMFVEYARNAARMAALMKARQIMVYTHDSIGLGEDGPTHQAVEQLASLRLTPNFSTWRPCDQVEAAVGWKLAVERHNGPTALILSRQNLAQVERTPDQVKEIARGGYVLKDSGGKPDIILIATGSEMEITLQAAEKLAGEGRNVRVVSLPSTDIFDAQDEEYRESVLPSNVAARVAVEAGIADYWYKYVG

SEQ ID NO: 59195 - protein, 97 aa, Homo sapiens
RYRCAFRLHLGNYSGPGATRLWSNCRRRYGAAFRSHARTKPHQSDGVYRRELWHYLCHCDGAWPDHHSQTWAARAVLDDRYSGNDRHCVDHLGCAQQ

SEQ ID NO: 59196 - protein, 116 aa, Homo sapiens
  misc_feature (1)...(116): Xaa = X or * as defined in Table 2
NGAGHLXRPPVDGATAAPAGGRYAHLRVCPESLPWLHLPAWRIYRSGSXSAPCHCRNHRSGSAWQKHYGNRFRFRTVRPYRGRALHLRGRNTAITQAADWRLATAQLLEIAGVGDE

SEQ ID NO: 59197 - protein, 108 aa, Homo sapiens
  misc_feature (1)...(108): Xaa = X or * as defined in Table 2
RWRQRWFWCLHCLVLFRITPRTFALSQCRPWDDSRSQDTSMSHSIQWNRMYCNCSMQDEQEADEANGKGPAQVGDRQAWAGRCRSHRREGTIPGNPHPRASXRAGWQR

SEQ ID NO: 59198 - protein, 394 aa, Homo sapiens
  DOMAIN (109)..(164): Bacterial regulatory helix-turn-helix protei domain identified by PFam, accession name HTH_1, E-value=1.1e-10, PFam score of 46.5
MTQDEVAVTEWDCSHVPSYEFAQVETINVDSKTNGHGTTIAVDNSPNKRNATSLSARLLAQSLAVFIGHNVGSGSNSGNDGRCSWRRSWYTLISSLDTLNQEILDIKNQELSGTLALYSRPSIAQCWLVPALGDFTRRYPSISLTVLTGNDNVNLQRAGIDLAIYFDDAPSAQLTHHFLMDEEILPVCSPEYAQRHALTNTVINLCHCTLLHDRQAWSNDSGTDEWHSWAQHYAVNLPTSSGIGFDRSDLAVIAAMNHIGVAMGRKRLVQKRLASGELVAPFGDMTVKCHQHYYITTLPGRQWPKIEAFIIWLREQASYLRSLLVRDMNHPVPAQHLLNPDQQRRQKRQTDKLTRRIKTNGRSAFMFREPAGHHPVIGRESRRFENTGYRAQTN

SEQ ID NO: 59199 - protein, 177 aa, Homo sapiens
RPYVLPVAGSNALGALGYVESALEIAQQCEGAVNISSVVVASGSAGTHAGLAVGLEHLMPESELIGVTVSRSVADQLPKVVNLQQAIAKELELTASAEILLWDDYFAPGYGVPNDEGMEAVKLLARLEGILLDPVYTGKAMAGLIDGISQKRFKDEGPILFIHTGGAPALFAYHPHV

SEQ ID NO: 59200 - protein, 651 aa, Homo sapiens
  DOMAIN (90)..(137): Glucose inhibited division protein A family proteins domain identified by eMATRIX, accession number BL01280H, p-value=1.000e- 40, raw score of 19.43
  DOMAIN (3)..(295): Glucose inhibited division protein A domain identified by PFam, accession name GIDA, E-value=3.3e-28, PFam score of 107.1
MFNDLFYLVTGILRPLIAELKTDLCARFYWESKFIQGLFFAGQINGTTGYEEAAAQGLLAGLNAARLSADKEGWAPARSQAYLGVLVDDLCTLGTKEPYRMFTSRAEYRLMLREDNADLRLTEIGRELGLVDDERWARFNEKLENIERERQRLKSTWVTPSAEAAAEVNAHLTAPLSREASGEDLLRRPEMTYEKLTTLTPFAPALTDEQAAEQVEIQVKYEGYIARQQDEIEKQLRNENTLLPATLDYRQVSGLSNEVIAKLNDHKPASIGQVRVFLASPAAISILLVWLKKRGNASRTVEIFIKRDDVTPMAMGGNKLRKLEFLAADALREGADTLITAGAIQSNHVRQTAAVAAKLGLHCVALLENPIGTTAENYLTNGNRLLLDLFNTQIEMCDALTDPNAQLEELATRVEAQGFRPYVIPVGGSNALGALGYVESALEIAQQCEGAVNISSVLRDGDLRSYAGTQGFRVGIIAQPDWSSKDDFMRLGKPNLFFGVTAGNMDSMINRYTADRRLRHDDAYTPDNVAGKRPDRATLVYTQRCKEAWKDVPVILGGIEASLRRTAHYDYWSDTVRRSVLVDSKADMLMFGNGERPLVEVAHRLAMGEPISEIRDVRNTAIIVKEALPGWNGVDSTVLIPWKNRPIPHPY

SEQ ID NO: 59201 - protein, 218 aa, Homo sapiens
MKLMAIQEQARGEQCFRDSEWDLQFHIQVALATQNSALAAIVEKMWTQRSHNPYWKKLHEHIDSRTVDNWCDDHDQILKALIRKDPHAAKLAMWQHLENTKIMLFNETSDDFEFNADRYLFAENPVAIAKELELTASAEILLWDDYFAPGYGVPNDEGMEAVKLLPRLEGILLDPVYTGKAMRGLIDGISQKRFKDEGPILFIHTGGAPALFAYHPHV

SEQ ID NO: 59202 - protein, 66 aa, Homo sapiens
LDLPAVYGGGTGDYADDPRNGDFGIPDPALTNQHLQLHDHCDGGLPDGIPVGGNQLCGGETGASLC

SEQ ID NO: 59203 - protein, 63 aa, Homo sapiens
  misc_feature (1)...(63): Xaa = X or * as defined in Table 2
RHPRCDPYGFCPFTADADDAXXLGACHHYWRGQRKIYAGSGDSRCQPDGRRSAPARRPLRRQR

SEQ ID NO: 59204 - protein, 795 aa, Homo sapiens
  DOMAIN (691)..(716): ATP synthase gamma subunit proteins domain identified by eMATRIX, accession number BL00153A, p-value=1.818e-24, raw score of 10.61
  DOMAIN (612)..(676): ATP synthase Alpha chain, C terminal domain identified by PFam, accession name ATP-synt_A-c, E-value=5.1e-34, PFam score of 102.4
VLDPSLLQGEVVSDGPLSPAEMTMEVAQLLRDAGPWGQMFPEPLFDGHFRLLQQRLVGERHLKVMVEPVGGGPLLDGIAFNVDTALWPDNGVREVQLAYKLDINETSRNAPTFLGGIFDYDAKKERLEEVNAELEQPDVWNEPERAQALGKERSSLEAVVDTLDQMKQGLEDVFRASSLWFGALVLVKKPTIRCRTGREIFIKRDDVTPMAMGGNKLRKLEFLAADALREGADTLITAGAIQSNHVRQTAAVAAKLGLHCVALLENPIGTTAENYLTNGNRLLLDLFNTQIEMCDALTDPNAQLEELATRVEAQGFRPYVIPVGGSNALGALGYVESALEIAQQCEGAVNISSVVVASGSAGTHAGLAVGLEHLMPESELIGVTVSRSVADQLPKVVNLQQAIAKELELTASAEILLWDDYFAPGYGVPNDEGMEAVKLLARLEGILLDPVYTGKAMAGLIDGISQKRFKDEGPILFIHTGAPETLMQESIQLVIDSLPFLLKGAGYTLQLSIGGMFFGLLLGFILALMRLSPIWPVRWLARFYISIFRGTPLIAQLFMIYYGLPQFGIELVPFRQQKCAAPDRQKTPPAGRFHPIPQGISITVYKLRFRGILFAAERGYLADVELSKIGSFEAALLAYVDRDHAPLMQEINQTGGYNDEIEGKLKGILDSFKATQSWPQGIEEKLMAGAKEIRSKIASVQNTQKITKAMEMVAASKMRKSQDRMAASRPYAETMRKVIGHLAHVMRPRGKGGLIVQSTKMGNTENDAEEPEKKKRKVEEILPLRHRSLLAGARS

SEQ ID NO: 59205 - protein, 90 aa, Homo sapiens
  misc_feature (1)...(90): Xaa = X or * as defined in Table 2
LCRPDKAFTPHPAXTKRILSAIXPSSFKEGIDHSATFFFAARFALVAAAIFCVFADGFFAFLASFFAAFGFVFFSPRKALSGSKFTFLPT

SEQ ID NO: 59206 - protein, 497 aa, Homo sapiens
  DOMAIN (46)..(75): Amino acid permeases proteins domain identified by eMATRIX, accession number BL00218A, p-value=8.000e-29, raw score of 15.58
  DOMAIN (312)..(494): Uncharacterised protein family UPF0056 domain identified by PFam, accession name UPF0056, E-value=1.4e-69, PFam score of 244.6
  misc_feature (1)...(497): Xaa = X or * as defined in Table 2
FTPLSLRAVVIQLANRQYLDEKSDRAVHQGHIPRQFYXSLRRNLTNRHIQLIAIGGAIGTGLFMGSGKTISLAGPSIIFVYMIIGFMLFFVMRAMGELLLSNLEYKSFSDFASDLLGPWAGYFTGWTYWFCWVVTGMADVVAITAYAQFWFPDLSDWVASLAVIVLLLTLNLATVKNVGEMEFWFAMIKIVRPLSGSRTKKMSKSDDNRNNVIGLLEDPKSVVKKIKRAVTDSDEPPVVRYDVQRPKRSALLERAPERFQEVFILKGREDKRLLPLIHALESQGGGYPVGKPPISRREKRPCRASGAYSPPVLLILIMDPLGNLPIFMSVLKHTEPKRRRAIMVRELLIALLVMLVFLFAGEKILAFLSLRAETVSISGGIILFLIAIKMIFPSASGNSSGLPAGEEPFIVPLAIPLVAGPTILATLMLLSHQYPNQMGHLVIALLLAWGGTFVILLQSSLFLRLLGEKRVNALERLMGLILVMMAPRCSSTAFECG

SEQ ID NO: 59207 - protein, 210 aa, Homo sapiens
  DOMAIN (57)..(81): DEAD-box subfamily ATP-dependent helicases proteins domain identified by eMATRIX, accession number BL00039C, p-value=5.875e- 18, raw score of 15.63
  DOMAIN (25)..(130): DEAD/DEAH box helicase domain identified by PFam, accession name DEAD, E-value=3.9e-32, PFam score of 104.5
MTDFSKHMRGVNVVALYGGQRYDVQLRALRQGPQIVVGTPGRLLDHLKRGTLDLSKLSGLVLDEADEMLRMGFIEDVETIMAQIPEGHQTALFSATMPEAIRRITRRFMKEPQEVRIQSSVTTRPDISQSYWTVWGMRKNEALVRFLEAEDFDAAIIFVRTKNATLEVAEALERNGYNSAALNGDINNEYINERNDLRHPRSAGPAGARP

SEQ ID NO: 59208 - protein, 405 aa, Homo sapiens
  DOMAIN (359)..(391): Bacterial regulatory proteins araC family proteins. domain identified by eMATRIX, accession number BL00041, p-value=7.750e-19, raw score of 23.99
  DOMAIN (307)..(393): Bacterial regulatory helix-turn-helix protei domain identified by PFam, accession name HTH_AraC, E-value=1.6e-36, PFam score of 134.8
MDERKIDFSLISSERAPRNVGKTAREKAKKGDAGKKGGKRRQVGKKVNFEPDSAFRVQALLERAPERFQEVFILKGREDKRLLPLIHALESQGVVIQLANRQYLDEKSDGAVHQGIIARVKPGQKPKSSRFANRHNFNVEFQVLTGQHVVTINHDVIVFNRSDFNRYRTLVGFSQETHTYLQFINAHKYVFRNTLHQVFVVLTVSVVRANSDIKFVANFMTFQRRFQARDQGTVTMQAVRLRGYRGNRRQQLGRRMESAGGFKLGMEPLNGGGRIPDLLGGQIQTASRSQALFEAIRDYIDERYASGLTRESVAQAFYISPNYLSHLFQKTGAIGFNEYLNHTRLEHAKTLLKGYDLKVKEVAHACGFVDSNYFCRLFRKNTERSPSEYRRQYHSQLTEKPTTPE

SEQ ID NO: 59209 - protein, 139 aa, Homo sapiens
  misc_feature (1)...(139): Xaa = X or * as defined in Table 2
LNRLLKLVHASQSSRAMVFSSIRSFMFFSTLFILVRRQFSRXTIMLSANSDSLTSSLPIWLLFISFSCLTALARTSSTVLKRSGESGHPCLVPVFRGNTFNFSPFSIMLAVGGVLHCEINCRICSTGRSANPPLDSCIL

SEQ ID NO: 59210 - protein, 30 aa, Homo sapiens
RWAPVVVILAPVMVIRLTPLKWEVIRSWMR

SEQ ID NO: 59211 - protein, 42 aa, Homo sapiens
RHRGDRKISRWVPQLMEKLQQLHSFLMSPATGRTKGWWLCQC

SEQ ID NO: 59212 - protein, 360 aa, Homo sapiens
  DOMAIN (86)..(134): Bacterial chemotaxis sensory transducers proteins domain identified by eMATRIX, accession number BL00538A, p-value=8.811e- 09, raw score of 23.61
  misc_feature (1)...(360): Xaa = X or * as defined in Table 2
MSAEITAPWYRLQLDLFTKLVATCMEQFRPKTIPPLAIPERLNAHCEELYELIASLNNILNLYMPAGQEAEHRFAMGELPDEVLEICQRLAKLTEMLRGLAELFLNDLSEKTGSHDIVRLHRLILQMNRALGMFEAQSKLWRLASLAQSSGAPVTKWATREEREGQLHLWFHCVGIRVSDQLERLLWRSIPHIIVTSATLRSLNSFSRLQEMSGLKEKAGDRFVALDSPFNHCEQGKIVIPRMRVEPSIDNEEQHIAEMAAFFRKQVESKKHLGMLVLFASGRAMQRFLDYVTDLRLMLLVQGDQPRYRLVELPANASPTVSAACWWAYSHLPKGLIXKVICSARCISTKSLFRPSTARW

SEQ ID NO: 59213 - protein, 674 aa, Homo sapiens; identical to SEQ ID NO: 55107
  DOMAIN (313)..(338): Peptidyl-tRNA hydrolase proteins domain identified by eMATRIX, accession number BL01195A, p-value=8.846e-22, raw score of 16.52
  DOMAIN (313)..(477): Peptidyl-tRNA hydrolase domain identified by PFam, accession name Pept_tRNA_hydro, E-value=1.1e-26, PFam score of 102.1

SEQ ID NO: 59214 - protein, 129 aa, Homo sapiens
  misc_feature (1)...(129): Xaa = X or * as defined in Table 2
LNSWLPSVPTVXSSVFNALXTGXISPAFNPFADMXSASGLPXIKSPLSTSTLFFTSLRASLIRLAVRTSPNFSVAVSLXXSKSIMLLCRSVVSMIRRSTVAAFTLAAISVARSVALNRFLIKSTGNACK

SEQ ID NO: 59215 - protein, 670 aa, Homo sapiens
  DOMAIN (201)..(222): Bacterial extracellular solute-binding proteins family 1 sig. domain identified by eMATRIX, accession number BL01037B, p-value= 7.429e-14, raw score of 19.68
  DOMAIN (201)..(318): Bacterial extracellular solute-bindin domain identified by PFam, accession name SBP_bacterial_1, E-value=3.6e-17, PFam score of 64.8
STHLLSYRPVLTPAPYRSGGSDDHSVLAFYGRELGKEVDSLAQRFNAENRITKLYRPIKATTNRIKRGDCRISYRQRAGYFEVYEVGTATMMASKAINRCMTCLKRQGFSSMSRVCADGFSHSTARPPFSITTRRLQESRIRPGTAAENLQDLADYAAKLKASGMKAATPAAGRAGSNWKTLGLERHDALRRRCERCATKAIIGGASLWVMQGKDKETYTGVAKFLDFLAKPENAAEWHQKTGYLPITKAAYDLTREQGFYEKNPGADTATRQMLNKPPLPFTKGLRLGNMPQIRVIVDEELESVWTGKKTPQQALDTAVERGNQLLRRFEKSTKPDKRSASGTVQELTVMSSSRPVFRSRWLPYLLVAPQLIITVIFFIWPAGEALWYSLQSVDPFGFSSQFVGLDNFVTLFHDSYYLDSFWTTIKFSTFVTVSGLLVSLFFAALVEYIVRGSRFYQTLMLLPYAVAPAVAAVLWIFLFNPGRGLITHFLAEFGYDWNHAQNSGQAMFLVVFASVWKQISYNFLFFYAALQSIPRSLIEAAAIDGAGPIRRFFKMLLFSRGLYGPALPVGRSFVFAHSWSARDAVDRTGGPGARGPEVGIASIGERIPIVLVLINSFMITTIDTSDNSSEIVNNQAPTARTIPQAGAGGDHPVQELTGGIGISGIGGIA

SEQ ID NO: 59216 - protein, 110 aa, Homo sapiens
GAPQHQMMSTYRINGRESPMLTYPSTPNFFWLAWQARDFMSKKYGRRFPIARFLWRSTPAPGVRKTIFIFISLVFVLMCANSWITIWRTSAAAGCHCQVVCAGMNTWRVG

SEQ ID NO: 59217 - protein, 583 aa, Homo sapiens
  DOMAIN (334)..(364): Prokaryotic sulfate-binding proteins domain identified by eMATRIX, accession number BL00401D, p-value=4.724e-30, raw score of 21.59
  DOMAIN (162)..(400): Prokaryotic sulphate- and thiosulphate- domain identified by PFam, accession name Sulphate_bind, E-value=1.6e-10, PFam score of -18.4
MPSTRYQKINAHHYRHIWVVGDIHGEYQLLQSRLHQLSFFPKIDLLISVGDNIDRGPESLDVLRLLNQPWFTSVKGNHEAMALEAFETGDGNMWLASGVYRIPLAVIWIIGSLTSKAYKAEVQQRREAFNRAKMDYDHLVRQIQQVGGLEGFIAKRTMLEKMKDEILGLPEEEKRALAALHDTARERQKQKFLEGFFIDVASIPGVGPARKAALRSFGIETAADVTRRGVKQVKGFGDHLTQAVIDWKASCERRFVFRPNEAITPADRQAVMAKMTAKRHRLESALTVGATELQRFRLHAPARTMPLMEPLQPTVSVVDKVVEKKGTKEVAEAYLKYLYSPEGQEIAAKNYYRPRDAEVAKKYENAFPKLKLFTIDEEFGGWTKAQKEHFANGVIAVVAAGIGYWKLTGEESDTLRKIVLEECLTNQQQNQNPSPCAEVKPNAGYVVLKDLSGPLPYLLMPTYRINGTESPLLTDPSTPNFFWLAWQARDFMSKKYGRRFPIARFLWRSTPAPGVRKTIFIFISLVFVLMCANSWITIWRTSAAAGCHCQPTGIAQALLSTRQHGGAQCPLLPLSPLLSSSSF

SEQ ID NO: 59218 - protein, 34 aa, Homo sapiens
  misc_feature (1)...(34): Xaa = X or * as defined in Table 2
IMPRISGSQSGEHQQPLVATARWFARAXILIIPL

SEQ ID NO: 59219 - protein, 185 aa, Homo sapiens
FSFPAQCFRPFAALVLLIAAFDIRGDPGIKLIVGGTDQVKKPGCHRLRRMLSRWLAKQHVVTWCVQQEGELWCANAFYLFDAQKVAFYILTEEKTRHAQMSGPQAAVAGTVNGQPKTVALIRGVQFKGEIRRLEGEESDLARKAYNRRFSVARMLSAPVWEIRLDEIKLRFFSFLRLLLRSRESR

SEQ ID NO: 59220 - protein, 138 aa, Homo sapiens
  DOMAIN (59)..(84): kw PERIPLASMIC GALACTOSE RIBOSE XYLOSE domain identified by eMATRIX, accession number DM01011C, p-value=6.040e-20, raw score of 17.35
GIIVGHPLVSFITGFPHGLEVMNVHPGKAFPRYLCAPETRIFNDLGMWLILQAGKTGKVLVVGTDGIPEARKMVEAGQMTATVAQNPADIGATGLKLMVDAEKSGKVIPQMAAIKHAEHLVKSNEELAKILLFIISVD

SEQ ID NO: 59221 - protein, 325 aa, Homo sapiens
  DOMAIN (258)..(283): kw PERIPLASMIC GALACTOSE RIBOSE XYLOSE domain identified by eMATRIX, accession number DM01011C, p-value=6.040e-20, raw score of 17.35
  DOMAIN (72)..(293): Periplasmic binding proteins and suga domain identified by PFam, accession name Peripla_BP_like, E-value=0.00028, PFam score of -12.7
MGPGAREMPVLALALAGLCAPRLRPIRSLRVDAEPEAGGHPQVHTPVTASDRKPGQKRLGPKGECGAQGGSPGLPHGFSSAALPRRGCCEDIVRCVYKPERPHQEPTMQARWSQIFSLQSCIYLVNLDEKIDMDNLKKAGGNVEAFVTTDNVAVGAKGASFIIDKLGAEGGEVAIIEGKAGNASGEARRNGATEAFKKASQIKLVASQPADWDRIKALDVATNVLQRNPNIKAIYCANDTMAMGIAQAVAHAGKTGKVLVVGTDGIPEARKMVEAGQMTATVAQNPADIGATGLKLMVDAEKSGKVIPLDKAPEFKLVDSILVTQ

SEQ ID NO: 59222 - protein, 655 aa, Homo sapiens
  DOMAIN (31)..(49): LYSYL-TRNA SYNTHETASE SIGNATURE domain identified by eMATRIX, accession number PR00982D, p-value=1.000e-16, raw score of 11.03
  DOMAIN (275)..(320): S4 domain identified by PFam, accession name S4, E-value=1.9e -13, PFam score of 58.1
MNLWLMTSPEYHMKRLLVAGCGPVFQLCRSFRNEEMGRYHNPEFTMLEWYRPHYDMYRLMNEVDDLLQQVLDCPAAESLSYQQAFLRYLEIDPLSADKTQLREVAAKLDLSNVADTEEDRDTLLQLLFTFGVEPNIGKKEPTFVYHFPASQALLGANQYRRSSGREFQYRTLATYPGFRVYFFQHFRDVSPIDVRNKVHVQVVFVRTQSFGHHVWAEVRTADPDVHYHRVDFRHYVFAINQNRGIATVTQRYVQHGAVRYIPFFTGEFMLPDSSVRLNKYISESGICSRREADRYIEQGNVFLNGKRATIGDQVKPGDVVKVNGQLIEPREAEDLVLIALNKPVGIVSTTEDGERDNIVDFVNHSKRVFPIGRLDKDSHGLIFLTNHGDLVNKILRCWHDHEKEYLVTVDKPITEEFILGMKALNAAQAIGDDRLQQQSQGRVVPDSFTHGTSQQRYSWFKRGFDSGDPAQCNTFGKHRVTIEKHNDDYRISLEQGTPGFEPPLEGETRAAIINALHLTEDDILPGLPIQVATTGHSKVMIPLKPEVDIDALSPDLNALTAISKKIGCNGFFPFQIRPGKNETDGRMFSPAIGIVEDPVTGNANGPMGAWLVHHNVLPHDGNVLRVKGHQGRALGRDGMIEVTVAVVIPCGRSGI

SEQ ID NO: 59223 - protein, 71 aa, Homo sapiens
GSVIDTFAISVSLLKNADAVPPPNETSRMKTVTNPHCIHMAIDGIPIAFRRVIGSGHNAFGVPWMMAFNGE

SEQ ID NO: 59224 - protein, 398 aa, Homo sapiens
RIASAVVTALTDISRVRLDGVVVFVSCVVLLCWWCVWRVCEEVRISIIVLWSGPCVVLASGCPYYRIAPIAAVLLRLRCCPCTIVSPRVRVSLRAAWRRRRHSETAFLLHSDDSDVRIRYFTPTVEVPICVNATGKHRVTIEKHNDDYRISLEQGTPGFEPPLEGETRAAIINALHLTEDDILPGLPIQVATTGHSKVMIPLKPEVDIDALSPDLNALTAISKKIGCNGFFPFQIRPGKNETDGRMFSPAIGIVEDPVTGNANGPMGAWLVHHNVLPHDGNVLRVKGHQGRALGRDGMIEVTVTIRDNQPEKVTISGTAGALPDPALADRNPLWQYAEKLDDTYCAVCHAPIAADHYTVNAWPSIAKGMGARTSMSVNELDILTRYFQYNAKDITEKQ

SEQ ID NO: 59225 - protein, 244 aa, Homo sapiens
  DOMAIN (158)..(201): RecR protein domain identified by eMATRIX, accession number BL01300C, p-value=1.000e-40, raw score of 19.53
  DOMAIN (81)..(122): RecR protein domain identified by PFam, accession name RecR, E-value=2.4e-21, PFam score of 84.3
MQKMQEEIAQLEVTGESGAGLVKVTINGAHNCRRVEIDPSLLEDDKEMLEDLLMEALRCLPGVGPKSAQRMAFTLLQRDRSGGMRLAQALTRAMSEIGHCADCRTFTEQEVCNICSNPRRQENGQICVVESPADIYAIEQTGQFSGRYFVLMGHLSPLDGIGPDDIGLDRLEQRLAEEKITEVILATNPTVEGEATANYIAELCAQYDVEASRIAHGVPVGGELEMVDGTTLSHSLAGRHKIRF

SEQ ID NO: 59226 - protein, 224 aa, Homo sapiens
  DOMAIN (25)..(35): ASPARTATE CARBAMOYLTRANSFERASE SIGNATURE domain identified by eMATRIX, accession number PR00101D, p-value=1.429e-13, raw score of 12.65
  DOMAIN (1)..(49): Aspartate/ornithine carbamoyltransferase domain identified by PFam, accession name OTCace, E-value=1.8e-08, PFam score of 33.8
MLDEKGIAWSLHSSIEEVMAEVDILYMTRVQKERLDPSEYANVKAQFVLIHSRICTFAAKITTADPKEPSSIDEVYSEEKEHAEGIQYYRFRGQERLLIRVEIRVGRSGLGAKSNHEVRITMEGSRMKYRIALAVSLFALSAGSYATTLCQEKEQNILKEISYAEKHQNQNRIDGLNKTLSEIRANCSDSQLRADHQKKNAKQKDEGAERQQNLAEAKQKGDAD

SEQ ID NO: 59227 - protein, 88 aa, Homo sapiens
  misc_feature (1)...(88): Xaa = X or * as defined in Table 2
ARNEVAQPGVHETLDELTTRLAEGLLEAAEEAGIPLVVNHVGGMFGIFFTDAESVTCYQDVMACDGGTLXAFLPYDAGRRCLQHGRYQ

SEQ ID NO: 59228 - protein, 380 aa, Homo sapiens
  misc_feature (1)...(380): Xaa = X or * as defined in Table 2
PAPYALLLLPMHPHGLRRRDRQGRIHNLNDRRRHWHRVRVCHLLRRERSRKDAPADGHPPLRAVGGRNQNXFGELRTTTCFTQTDFLTFNLTSVTSNEASFTQFRTQGLVVFHQSAGDTVTDRTSLTRDTTTFNGDVQVQFLNHVDQFQRLTNYHAGSFTTEVLFQRTLVDYDFTVARFDENASCGTFAATSAVVLIFSHCLRLLCRVVVLVTRVNFQFTEHSTTQRAFWQHAFNRDFNHTLRTASNHLFKGRLFDTTDVAGVVIVHFVSTLVAGYSNFVSVQNDDVITGIYVRSVFRFVLTAQATSQFSSQTAQSFTGRVNNIPVAFYGFWFSCAKYYRHGARWCSNGRKIDQRHTHCFFCPCIRTDFAVEIGKEEFIT

SEQ ID NO: 59229 - protein, 265 aa, Homo sapiens
  DOMAIN (2)..(28): Prokaryotic molybdopterin oxidoreductases proteins domain identified by eMATRIX, accession number BL00551B, p-value=7.983e- 12, raw score of 23.29
  DOMAIN (1)..(67): Prokaryotic molybdopterin oxidoreduct domain identified by PFam, accession name molybdopterin, E-value=9.7e-16, PFam score of 51.8
MIVFIENFKTSSPKYADILLPDLMTVEQEDIIPNDYAGNMGYLIFLQPVTSEKFERKPIYWILSEVAKRLGPDVYQKFTEGRTQEQWLQHLYAKMLAKDPALPSYDELKKMGIYKRKDPNGHFVAYKAFRDDPEANPLKTPSGKIEIYSSRLAEIARTWELEKDEVISPLPVYASTFEGWNSPERRTFPLQLFGFHYKSRTHSTYGNIDLLKAACRQEVWINPIDAQKRGIANGDMVRVFNHRGEVRLPAKVTPHPVGTWTAEPS

SEQ ID NO: 59230 - protein, 339 aa, Homo sapiens
LRFIVQPRLLIMLLPCQTVRLVQLMRVLLIKLVAPFIILPAPRRIAVFADERQRQAPVVAVVKMNFSRRCVFRLHLSGQLLHRQPALRKPRPAFTAHAVCPDFFLQPVQQPHQFSREHHAVAVLTPFLLERLCQAAPLRFFPLAVLCLDPDERREASRLVYRLDTCGVSLHRRQPVSVPAIPRHLRFTRQRHPPRQVTLPPPDPFCHSPSQRVVEVAALDQWLAMLYPRVEHQAVLAVVVVVVGPLVVRPYHTRRDAVRLLREDPARVDLRITRSCSCCSVCDGCVLLSLSSLCLCLSVCLAFCIARSLLFLVVSSPNPRIVPYGLVKKACTRPFEGPC

SEQ ID NO: 59231 - protein, 908 aa, Homo sapiens
  DOMAIN (220)..(233): PROTEIN PMBA HOMOLOG TLDD TLDE AF0655 MT domain identified by eMATRIX, accession number PD02678A, p-value=7.469e-13, raw score of 6.25
  DOMAIN (34)..(265): Putative modulator of DNA gyrase domain identified by PFam, accession name PmbA_TldD, E-value=6e-47, PFam score of 169.4
MSLNLVSEQLLAANGLKHQDLFAILGQLAERRLDYGDLYFQSSYHESWVLEDRIIKDGSYNIDQGVGVRAISGEKTGFAYADQISLLALEQSAQAARTIVRDSGDGCREADKRVQEVTASLSGVYELILVAATDGTLAADVRPLVRLSVSVLVEEDGKRERGASGGGGRFGYEFFLADLDGEVRADAWAKEAVRMALVNLSAVAAPAGTMPVVLGAGWPGVLLHEAVGHGLEGDFNRRGTSVFSGSKVFALAGCVVLMTTMPDSCNSWQKCRNKTMNKKIHSLALLVNLGIYGVAQAQEPTDTPVSHDDTIVVTAAEQNLQAPGVSTITADEIRKNPVARDVSKIIRTMPGVNLTGNSTSGQRGNNRQIDIRGMGPENTLILIDGKPVSSRNSVRQGWRGERDTRGDTSWVPPEMIERIEVLRGPASARYGNGAAGGVVNIITKKGSGEWHGSWDAYFNAPEHKEEGATKRTNFSLTGPLGDEFSFRLYGNLDKTQVTRGISTRAISPRVPERMPRRYQPARRGNQFFHIHTKILGKWTIFAHYLAQVRDKISAAAKRCGRSPEEITLLAVSKTKPASAIAEAIDAGQRQFEHFDWCHTIDRLRIATRLNDQRPAELPPLNVLIQINISDENSKSGIQLAELDELAAAVAELPRLRLRGLMAIPAPESEYVRQFEVARQMAVAFAGLKTRYPHIDTLSLGMSDDMEAAIAAGSTMFVVKVTQPIIGPLRRVIPAMGPIDSASLLVAYILSFIKAIVLFKVVTFLPIIWIAGLLILLKTIGLLIFWVLLVMAIMSWCKTELIIFRDLPALGKLFSQSPPVALDQRFFGDFILEASAKYADVALIYGLEDGREYRDKQQTLGEIVQQLLGAAPVVGDQVEFAGMIWTVAEKEDNEVLKIGVRVAEEEAES

SEQ ID NO: 59232 - protein, 750 aa, Homo sapiens
  DOMAIN (241)..(274): Bacterial extracellular solute-binding proteins family 3 sig. domain identified by eMATRIX, accession number BL01039B, p-value= 7.429e-18, raw score of 20.00
  DOMAIN (382)..(671): Putative modulator of DNA gyrase domain identified by PFam, accession name PmbA_TldD, E-value=2.3e-49, PFam score of 177.4
MAPWQPAEGHRFNPAKLLIDPCARQIDGEFKDNPLLHAGHNEPDYRDNAAIAPKCVVVVDHYDWEDDAPPRTPWGSTIIYEAHVKGLTYLHPEIPVEIRGTYKALGHPVMINYLKQLGITALELLPVAQFASEPRLQRMGLSNYWGYNPVAMFALHPAYACSPETALDEFRDAIKALHKAGIEVILDIVLNHSAELDLDGPLFSLRGIDNRIDVDICRGVAAAVFGDDTKVKYTPLTAKERFTALQSGEVDLLSRNTTWTSSRDAGMGMAFTGVTYYDGIGFLTHDKAGLKSAKELDGATVCIQAGTDTELNVADYFKANNMKYTPVTFDRSDESAKALESGRCDTLASDQSQLYALRIKLSNPAEWIVLPEVISKEPLGPVVRRGDDEWFSIAYKRNITVGRIRRLRRIRQPLPDATLCVLSGLQTEHNRSLLALEQSAQAARTIVRDSGDGKVQTLGAVEHSPLYTSVDPLQSMSREEKLDILRRVDKVAREADKRVQEVTASLSGVYELILVAATDGTLAADVRPLVRLSVSVLVEEDGKRERGASGGGGRFGYEFFLADLDGEVRADAWAKEAVRMALVNLSAVAAPAGTMPVVLGAGWPGVLLHEAVGHGLEGDFNRRGTSVFSGQVGELVASELCTVVDDGTMVDRRRSGGMERKYPSSKVLMFFLKESRSVISLECSGRIKVVPSSIVIMSYKWQSKKPNPTLSTFNAVTVQLWPQLKSPLRKQFYFSKQQKYIGKNAGLVPK

SEQ ID NO: 59233 - protein, 950 aa, Homo sapiens
  DOMAIN (155)..(181): Prokaryotic molybdopterin oxidoreductases proteins domain identified by eMATRIX, accession number BL00551B, p-value=9.308e- 22, raw score of 23.29
  DOMAIN (574)..(751): Aminotransferases class-III pyridoxal-p domain identified by PFam, accession name aminotran_3, E-value=5.8e-51, PFam score of 148.1
MLQGDLRLLNIGQSITFGDFKNKLPRFNLIFSQQLTDFNRKTSLTYRGWRQINSKRVCSMTHMSILDDKPNSCATDKKVSGLTQFIISRWTASSAANKKIPTQISFFFVCMNSIPKHQCGQHKIQPQNSQRRVDNAAAVLPINRIIEGLRKLETVIAIDNQWTSTCRFADIVLPATTQFERNDLDQYGNHSNRGIIAMKQVVPPQFEARNDFDIFRELCRRFNREEAFTEGLDEMGWLKRIWQEGVQQGKGRGVHLPAFDDFWNNKEYVEFDHPQMFVRHQAFREDPDLEPLGTPSGLIEIYSKTIADMNYDDCQGHPMWFEKIERSHGGPGSQKYPLHLQSVHPDFRLHSQLSFEQCAGFLRINHGDNPLDASTVHPEAYPVVERILAATQQALKDLMGNSSELRNLKASDFTDEKFGVPTVTDIIKELEKPGRDPRPEFKTAQFADGVETMNDLQPGMILEGAVTNVTNFGAFVDIGVHQDGLAELIKDVYGIDDALRAIAGDSVSGLGTGGINRHVRARFINHANNPQRYATTLNLSHLSEELSNLPYATQLRRKGMDEPMDLTVTARAVDEFGALLIIDEVMTGFRVALAGAQDYYGVVPDLTCLGKIIGGGMPVGAFGGRRDVMDALAPTGPVYQAGTLSGNPIAMAAGFACLNEVAQPGVHETLDELTTRLAEGLLEAAEEAGIPLVVNHVGGMFGIFFTDAESVTCYQDVMACDVERFKRFFHMMLDEGVYLAPSAFEAGFMSVAHSMEDINNTIDAARRVVYCWCSLTDPGGAAVNLYRRAIFYLFVEKAEPLIFPYNGHCTPGRIKRLRDNGCPMRRWRVLSGLQTAPNRRSDKAFTPHPTNHAGSQLRKHPTCSIDGVIDIFHAMIAGGTTHTAARLFITDINLFCPLCLRETINQPLAILLLIVLTVRRIFAAAMITGTNTMMLIRRILWREISKQHTA

SEQ ID NO: 59234 - protein, 445 aa, Homo sapiens
  DOMAIN (320)..(430): Molydopterin dinucleotide binding dom domain identified by PFam, accession name Molydop_binding, E-value=0.00054, PFam score of 15.4
  misc_feature (1)...(445): Xaa = X or * as defined in Table 2
MTGKCGKFGNFLESWRAQKTGICGKVWNFLENLLNGFGQNAYSDTDNEVQAEVVSDKDKELVGNWSKGHSCYAKRLAAFCPCLRDLWNFELERDDLGYLVEEISKQQTIQEEADHKNLESLQTEDAIEKKTPFSGEKFKLAAEICISNKDPNINSQDDGENVPRVAVHPNGCFAWKLPVLSRKFERKPIYWILSEVAKRLGPDVYQKFTEGRTQEQWLQHLYAKMLAKDPALPSYDELKKMGIYKRKDPNGHFVAYKAFRDDPEANPLKTPSGKIEIYSSRLAEIARTWELEKDEVISPLPVYASTFEGWNSPERRTFPLQLFGFHDKSRTHSTYGNIDLLKAACRQEVWINPIDAQKRGIANGDMPYVFSSQMAKFTPRTGLSSLIWKAHKCGEALETLQKQXCXQSGATLPAGPRARAWPPYPRLFPTGLACVDLHGNARKAT

SEQ ID NO: 59235 - protein, 50 aa, Homo sapiens
  misc_feature (1)...(50): Xaa = X or * as defined in Table 2
AFLPYDAGRRCLPGTVSVXSGLYVRGAQHGRYQXHHRCCTSDKIWRADKG

SEQ ID NO: 59236 - protein, 538 aa, Homo sapiens
  DOMAIN (103)..(129): Prokaryotic molybdopterin oxidoreductases proteins domain identified by eMATRIX, accession number BL00551B, p-value=3.475e- 17, raw score of 23.29
  DOMAIN (102)..(168): Prokaryotic molybdopterin oxidoreductas domain identified by PFam, accession name molybdopterin, E-value=2.7e-21, PFam score of 68.6
MVTIKPYILGEGDDETAKNAAVGFAKEPVARRTVSSNWRSGSECLYDHGPQMTAIRDGVRGKDKLDVPIKFIWNYAGNTLVNQHSDINKTHEILQDESKCEMIVVIENFMTSSAKYADILLPDLMTVEQEDIIPNDYAGNMGYLIFLQPVTSEKFERKPIYWILSEVAKRLGPDVYQKFTEGRTQEQWLQHLYAKMLAKDPALPSYDELKKMGIYKRKDPNGHFVAYKAFRDDPEANPLKTPSGKIEMYSSRLAEIARTWELDKDEVISPLPVYASTFEGLDSPERKTFHWHWLVPLQIPNHQLTAYDLLKGTKKISSPEWGTGLTEHGRSTTHQRPKMSTHAHTNSREKTAERTTDRTTARRRLNRNQPFQESTTDINQPADTAPPFLPDKRPPTTERFWLVYGECAVRVSFASPFDIEELKMPPLDDANAATFVHGTHEGALNSIAWGLDCVSLRALVWVVCGPIGILPGFNSDRGNSRTSDFQEYAKFRVSTGFSQGQGVQERGSLSHAQGGAFSQRACPAEPVERAGFWSLEPG

SEQ ID NO: 59237 - protein, 63 aa, Homo sapiens
LHSQPPPWIKAERYAHRRHAGGWPEAGYPHERVGKSGTSRPEYGSGCRTRDFSDGGRGCGFRG

SEQ ID NO: 59238 - protein, 69 aa, Homo sapiens
IRQADGEDGPHPGGCDTDGRRADPPLPLRQPAPPGVLHADTAWRATGREPLPLRPAGTANGKTGLAAGA

SEQ ID NO: 59239 - protein, 1116 aa, Homo sapiens
  DOMAIN (1064)..(1081): FOS TRANSFORMING PROTEIN SIGNATURE domain identified by eMATRIX, accession number PR00042B, p-value=6.379e-10, raw score of 10.70
  DOMAIN (629)..(725): Molydopterin dinucleotide binding dom domain identified by PFam, accession name Molydop_binding, E-value=2.9e-19, PFam score of 77.4
GVYAAFDSRCLMRRCASYQAYIPEHNRRLNGLKHQDLFAILGQLAERRLDYGDLYFQSSYHESWVLEDRIIKDGSYNIDQGVGVRAISGEKTGFAYADQISLLALEQSAQTARTIVRDSGDGMVVGCGVNALSDLRFGAVVGPIRRASVASGIRCRIKYGAPIKVDSSPAGIWNGNSTIRPHQSANTSSKPPTSAEITMCGIVRRKPIIRAICGAIKPTKLNGPIVIVAVAVRQAANSSSAIRVGVSAIPTARAVSPPSGKMVSQRRHSGPVQQPHQFSREHHAVAVLTPFLLERLCQAAPLRFFPLAVLCLDPDERREASRLVYRLDTCGVSLHRRQPVSVPAIPRHLRFTRQRHPPRQVTLPPPDPFCHSPSQRVVEVAALDQWLAMLYPRVEHQAVLAVVVVVVGPLVVRPYHTRRDAVRLLRQPAVFIVAVDIVRILRDAGYPANCECFGPLRVRHRCPRVRAYGFDSTLCRLPPSRGRALRFRFWRFTHDVITRRGKRGGAITGGCDIVQMFTEGRTQEQWLQHLYAKRLAKDPALPSYDELKKMGIYKRKDPNGHFVAYKAFRDDPEANPLKTPSGKIEIYSSRLAEIARTWELEKDEVISPLPVYASTFEGWNSPERRTFPLQLFGFHYKSRTHSTYGNIDLLKAACRQEVWINPIDAQKRGIANGDMVRVFNHRGEVRLPAKANMSGDKIDHGGCVNTLNTLWAFNIGEGNPQQLSVQIGKYTTTRIRVTSAKPHGTRNLPRARRNTELKLAGCRRDTTDTGGDRNRGPSTGLQPGEATESKNRRYRVVTAVHDTQHPPTSPPLPAPARNPPHRVKLKLLHVQQQTRRIFQQLFDRYQEAHGFATIDQTVIVGQRQVHHRQDLNLTIHRHRTIFDSVDTQNWALGRVDNRVNIRGTGTPPCTKPQRRRELTQTPTTETEPEQGKREHRGDRGRAEEADKARADDQRRGGRRERSGETENKTEQRERKKRRNHARGGRPPKDRRREKERDGRATARTAARGAGTGTGRERTKTERRASEEGCKREGRRKTNRNGEETRQARARTGQKREGRSTGGVETATEEDEEKEKQRRERDATQGSGTRRSEDNAASNTNRQAERKEKETAEERTR

SEQ ID NO: 59240 - protein, 86 aa, Homo sapiens
RLTCGASLMSQKYLFIDRDGTLISEPPSDFQVDRFDKLAFEPGVIPELLKLQKAGYKLVMITNQDGLGTQSFPQADFDGPHNLVPS

SEQ ID NO: 59241 - protein, 73 aa, Homo sapiens
LKRHDLCRAIGELITFEVKDVAQLTNPLPKGPYGTVLSNPPYGERLDSEPALIALHSLLGRIMHKQVGGWEST

SEQ ID NO: 59242 - protein, 812 aa, Homo sapiens
  DOMAIN (488)..(535): Imidazoleglycerol-phosphate dehydratase proteins domain identified by eMATRIX, accession number BL00954B, p-value=7.500e- 37, raw score of 19.92
  DOMAIN (490)..(531): Imidazoleglycerol-phosphate dehydratase domain identified by PFam, accession name IGPD, E-value=4.4e-33, PFam score of 98.9
MGQEKLYIEKELSWLSFNERVLQEAADKSNPLIERMRFLGIYSNNLDEFYKVRFAELKRRIIISEEQGSNSHSRHLLGKIQSRVLKADQEFDGLYNELLLEMARNQIFLINERQLSVNQHLTSCLIKPPLTSVHCPYIFRYTPTLSYRHRHLPAASWGYPPLTPIFQIWPCTFMHAYHAFFDPVSHHRACQNLTTFVPDTHQIAIRNTKACSIFEREYLMAALERDPLRRAVFDSETNYILARFKASSAVFKSLWDQGIILRDQNKRPSLSGCLRITVGTREESQRVIDALPSLMSQKYLFIDRDGTLISEPPSDFQVDRFDKLAFEPGVIPELLKLQKAGYKLVMITNQDGLGTQSFPQADFDGPHNLMMQIFTSQGVQFDEVLICPHLPADECDCRKPKVKLVERYLAEQAMDRANSYVIGDRATDIQLAENMGITGLRYDRETLNWPMIGEQLTRRDRYAHVVRNTKETQIDVQVWLDREGGSKINTGVGFFDHMLDQIATHGGFRMEINVKGDLYIDDHHTVEDTGLESARYLNCAQMRKHQRTRQPFIIAEVFCYHHHRHCCGLDRKLSRISSQRRSGKHRQRRLLLALCHTRLLGKHHTIVRLDMHNVGMPADDGDTRPLLTVPDFGAGDIAQSREMLEPAHKGLPDDPALIRQLAYVNQRLDDMPATQHYARLVIDDIDNQALITPLTPEQNQQRFNFRRLHEEVGRRWTFSFDSSIGLRSGAMSTANNNVGGAAPGKSYRSYGQLEAEYRIGRNMLLEGDLFSVYSRVFADTGENGVMMPVKNKMSGTGMRRNPLLDQISGSDA

SEQ ID NO: 59243 - protein, 58 aa, Homo sapiens
  DOMAIN (25)..(58): CTF/NF-I proteins domain identified by eMATRIX, accession number BL00349G, p-value=3.069e-09, raw score of 19.72
QCRLALSNPCRSSSSSSSSSSSSSSSSSSSPSPSPSPSPSSSSSSSSFLRQSLPLLPS

SEQ ID NO: 59244 - protein, 137 aa, Homo sapiens
  DOMAIN (2)..(47): RIBOSOMAL PROTEIN 40S ZINC-FINGER METAL domain identified by eMATRIX, accession number PD01457A, p-value=5.422e-09, raw score of 16.51
MKKKKKEKEKEKEKKKKKKKKKKKKKKKEEEEEGRRRRRRRRRRRRRRRRRRRRRRRRKKVLSPSSTDLKSSSAKLRSAASTQVGEEPTQNTKRENRCKCEKTQESHVAKQKPTYRPLSVNAIYWITGYIEPPKILR

SEQ ID NO: 59245 - protein, 68 aa, Homo sapiens
LSLLRELGPVVAALLFAGRAGSALTVRNRPDARYRATLQYGDDGGGSAASGYFSPFLGWGYFITTVDG

SEQ ID NO: 59246 - protein, 546 aa, Homo sapiens
MATEFMTQVAKLEGIRKIKRKNWRNSKLKVISNGADVPSDHLAGQYLTTSLQYANGRIRRSRRIRRCALKPDATLTASYHAYGYALRCNNIDLIWPMARAVHDAVKRNTLNASLKPSRRLSVRYHGYQSGNDMPLTSLRADKLIGIPPERRTRALLAALFVCLKAANVTPYVLNRPTRFMRRSITWRPESALSGQYWWRCCGRVADITLDPKTYLPRVRWKLNNVITTFQIPVREHSYFRPAGGTISGIKLGFEDPELGTAILKDGEQFRTLSLRWWTCRHDKSKPTAVPGVDIKPTIHARRFAVEKLSDRNAISLCRWRIKRKQALVSGTQDQPDAEEDQNVAARISAQKSKPTSQTPQIMVRAAGLRIAKARRVYCAQHPGDAEHHKASDRVLSSTSIPSDCQYTSVNEDSIKRHNCFYGAHQALFDITLDSHRAKRWCYLAPAARQNLIEAPCVYWGLIKIKRWPVQKNLERCVSNLIAIVTRCIFWCQAAACCYCPCVDDDPQVLLFDEPTAALTPELRHKSSASFVSWQKRIYPGDRHPRS

SEQ ID NO: 59247 - protein, 1012 aa, Homo sapiens; identical to SEQ ID NO: 48557
  DOMAIN (308)..(326): Aldehyde dehydrogenases glutamic acid proteins domain identified by eMATRIX, accession number BL00687A, p-value=6.400e- 10, raw score of 17.67
  DOMAIN (669)..(806): Prokaryotic transcription elongation factor domain identified by PFam, accession name GreA_GreB, E-value=5.3e-56, PFam score of 199.5

SEQ ID NO: 59248 - protein, 473 aa, Homo sapiens
  DOMAIN (435)..(446): PROTEIN REPEAT MUSCLE CALCIUM-BI domain identified by eMATRIX, accession number PD00301B, p-value=3.423e-09, raw score of 5.49
MRTGHGGPARSSSLPAAELLQEVSGSGGPSAAPNPCGAQCRAEPHSPSCRGLIETSYKMVTMSPVSRMQLEVQGPAAHSGGENTFTWEWADPSAAGILSCVKQSGAKSHSHWATEEQHENRRWRGEDDDEKLNPTAKIRKGMHASIISNKQDAKNKIKYIWLIFLYSAVRGNTLQHKECLEERGPVNPLESPTIDCRIKGMRKAMRASEGIRLDARYRATLQYGDDGGGSVASGYFSPFLGWGYFITTVDGYFRRRGDLGRISALLAALFVCLKAANVTSIRTEPTYTLYATFDNIGGLKARSPVSIGGVVVGRVADITLDPKTYLPRVTLEIEQRYNHIPDTSSLSIRTSGLLGEQYLALTVGSIDAKSSINLMSKSKFSPLVSLLQNVAFAFFMTKKRGRRRRRRRRRRRRRRRRKEEKKKKKKKKEKEKEKEKEKKRKEEEEEEEEEEEEEEEEEEEKMYAYGCPSQKNK

SEQ ID NO: 59249 - protein, 500 aa, Homo sapiens
  DOMAIN (349)..(368): RAB GDI/REP PROTEIN FAMILY SIGNATURE domain identified by eMATRIX, accession number PR00891A, p-value=9.239e-10, raw score of 6.55
  DOMAIN (380)..(456): Binding-protein-dependent transport system domain identified by PFam, accession name BPD_transp, E-value=9.1e-13, PFam score of 55.8
MVELDALAKPYRFPLAGVHGAERRDINGKTHIVHLPDAIARDISVQLHTVIAQYPGAELEAKGMAFALHYRQAPQHEDALMTLAQRITQIWPQMALQQGKCVVEIKPRGTSKGEAIAAFMQEAPFIGRTPVFLGDDLTDESGFAVVNRLGGMSVKIGTVSNRIAPPDEHAASAGGLAVGILGALKAAGGLWFGWSGETGNEDQPLKKVKKGKNSKIGAGSRLWANVTIYHEIQIGQNCLIQSGTVVGADGFGYANDRGNWAIDLPSRLLSPDAQHWLGTDHLGRDIFSRLMAATRVSLGSVMACLLLVLTLGLVIGGSAGLIGGRVDQATMRVADMFMTFPTSILSFFMVGVLGTGLTNVIIAIALSHWAWYARMVRSLVISLRQREFVLASRLSGAGHVRVFVDHLAGAVIPSLLVLATLDIGHMMLHVAGMSFLGLGVTAPTAEWGVMINDARQYIWTQPLQMFWPGLALFISVMAFNLVGDALRDHLDPHLVTEHAH

SEQ ID NO: 59250 - protein, 587 aa, Homo sapiens
  DOMAIN (238)..(250): ALPHA-AMYLASE SIGNATURE domain identified by eMATRIX, accession number PR00110B, p-value=9.122e-10, raw score of 13.38
  DOMAIN (109)..(566): Alpha amylase domain identified by PFam, accession name alpha -amylase, E-value=9e-38, PFam score of 138.9
  misc_feature (1)...(587): Xaa = X or * as defined in Table 2
KSQLHDPCCAPIQQEAVRAVVGQPPQQHLGFPVERGVCQRECDFEKELEARIASLSDSVSNAREERMALRQEQEQLQSRIQSLMQRAPVWLAAQNSLNQLSEQCGEEFTSSQRTHGHSEGNITKRGLLGELRFENGDPSNDQSYGRHKDGMAEIGTFHGGDLRGLTNKLDYLQQLGVNALWISAPFEQIHGWVGGGTKGDFPHYAYHGYYTQDWTNLDANMGNEADLRTLVDSAHQRGIRILFDVVMNHTGYATLADMQEYQFGALYLSGDEVKKSLGERWSDWKPAAGQTWHSFNDYINFSDKTGWDKWWGKNWIRTDIGDYDNPGFDDLTMSLAFLPDIKTESTTASGLPVFYKNKMDTHAKAIDGYTPRDYLTHWLNQWVRDYGIDGFRVDTPKCLRCNPSITIGTNYSASXPQWSSIPGALXGXPAWAGGLPWAPSVLLLDHLRQGFTMLEENLGNTIQDIGMGKDFMSKTPKATVTKAKIEKWNLIKLKSFCTAKETTIRVNRQPTEWEKIFAIYSSDKGLISRIYKELKQIYKEKNKQPHQQVGEGHEQTLLKRRHGCSQQTHEKMLNHQWPSEKCKSRPQ

SEQ ID NO: 59251 - protein, 373 aa, Homo sapiens
  DOMAIN (327)..(359): Bacterial regulatory proteins araC family proteins. domain identified by eMATRIX, accession number BL00041, p-value=7.750e-19, raw score of 23.99
  DOMAIN (275)..(361): Bacterial regulatory helix-turn-helix p domain identified by PFam, accession name HTH_AraC, E-value=5.4e-29, PFam score of 109.7
MSLAFLPDIKTESTTASGLPVFYKNKMDTHAKAIDGYTPRDYLTHWLSQWVRDYGIDGFRVDTAKHVELPAWQQLKTEASAALREWKKANPDKALDDKPFWMTGEAWGHGVMQSDYYRHGFDAMINFDYQEQAAKAVDCLAQMDTTWQQMAEKLQGFNVLSYLSSHDTRLFREGGDKAAELLLLAPGAVQIFYGDESSRPFGPTGSDPLQGTRSDMNWQDVSGKSAASVAHWQKISHAILSCIHLPSHGFRSMSSAWSQTRPLLNNPSSSRKSMRTCITPCCPAFYISPNYLSHLFQKTGAIGFNEYLNHTRLEHAKTLLKGYDLKVKEVAHACGFVDSNYFCRLFRKNTERSPSEYRRQYHSQLTEKPTTPE

SEQ ID NO: 59252 - protein, 865 aa, Homo sapiens
  DOMAIN (226)..(238): ALPHA-AMYLASE SIGNATURE domain identified by eMATRIX, accession number PR00110B, p-value=9.122e-10, raw score of 13.38
  DOMAIN (112)..(603): Alpha amylase domain identified by PFam, accession name alpha -amylase, E-value=1.5e-27, PFam score of 104.9
PPQWRLFRDGEYTLQIDTRSGTPTLMISIQNAAEPVASLVRECPKWDGLPLTVDVSATFPEGAAVRDYYSQQIAIVKNGQIMLQPAATSNGLLLLERAETDTSAPFDWHNATVYFVLTDRFENGDPSNDQSYGRHKDGMAEIGTFHGGDLRGLTNKLDYLQQLGVNALWISAPFEQIHGWVGGGTKGDFPHYAYHGYYTQDWTNLDANMGNEADLRTLVDSAHQRGIRILFDVVMNHTGYATLADMQEYQFGALYLSGDEVKKSLGERWSDWKPAAGQTWHSFNDYINFSDKTGWDKWWGKNWIRTDIGDYDNPGFDDLTMSLAFLPDIKTESTTASGLPAGKTRQEAGDLPDNTPQMQTSVVIRNSGVYGRSGSHRRLPWFTAWISAETGVGARHRVGKPCLQRQLRRFTARTAQQHQRRPHQHVIAVSKVRWCQFHHFAEVQGAQFVVKNEQCESEEHVTHTGHDERFHCRCAILRIGVIEPDQQIGAQAHAFPAEVHQQQVVGKHQNHHAGDEQGYIDRKGDMAKGIGFFARCLMCQPASTQGNRKISNPIFSNEHLPVFHQRLMEIVNESIIKINENNRICLRFSAEAERHWIEFYNQVESEMRMIGLLYDFKDYASKMAENMARLAALLHYFSGDGGDISVTAVKAAVEIVAWYIEEYIRLFSKKEEFSLDVSEADELYCWIKDYCTQKFSSCIKKNVSLERITIIAREKMMKKTAAIISACMLTFALSACSGSNYVMHTNDGRTIVSDGKPQTDNDTEYQIIISPEYQGKGLATRAAKLAMDYGFTVLNLYKLYLIVDKENEKAIHIYRKLGFSVEGELMHEFFINGQYRNAIRMCIFQHQYLAEHKTPGQTLLKPTAQ

SEQ ID NO: 59253 - protein, 340 aa, Homo sapiens
  misc_feature (1)...(340): Xaa = X or * as defined in Table 2
RGSTGAHPRSAGKHYAKTSAGNAAGDPXYGQMGPHHRGCGKPVPLPDHQSENLRWWXRRAWCGSGGYRMAEGRHAAQGIIDWLGLDVDKLGALEERRKVLQVKTENLQAERNSRSKSIGQAKARGEDIEPLRLEVNKLGEELDAAKAELDALQAEIRDIALTIPNLPADEVPVGKDENDNVEVSRWGTPREFDFEVRDHVTLGEMHSGLDFAAAVKLTGSRFVVMKGQIARMHRALSQFMLDLHTEQHGYSENYVPYLVNQDTLYGVGLYPLGALASGWLPKRRERKDATPGPTGYPGAHGNLELPERSEGPRAGGEPRRRTGHTQKGSPDRGQTPPKGP

SEQ ID NO: 59254 - protein, 347 aa, Homo sapiens [sequence omitted]

SEQ ID NO: 59255 - protein, 843 aa, Homo sapiens
  DOMAIN (70)..(109): D-amino acid oxidases proteins domain identified by eMATRIX, accession number BL00677C, p-value=4.500e-38, raw score of 26.61
  DOMAIN (193)..(272): Acetyltransferase (GNAT) family domain identified by PFam, accession name Acetyltransf, E-value=3.9e-18, PFam score of 73.7
MPRHTPSLQPTAVNHQICEGGHPRPPRHELTFQLTHSQPSQTPEWLTERGVKFFQRKVESFEEVAREGADVIVNCTGVWAGALQRDPLLQPGRGQIMKVDAPWMKHFILTHDPERGIYNSPYIIPGDIYPKEDKGMSEIVIRHAETRDYEAIRQIHAQPEVYCNTLQVPHPSDHMWQERLADRPGIKQLVACIDGDVVGHLTIDVQQRPRRSHVADFGICVDSRWKNRGVASALMREMIEMCDNWLRVDRIELTVFVDNAPAIKVYKKYGFEIGGTGKKYALRNGEYVDAYYMARDQFAHIYFELGTCLLLCVFANTSLENTRVSNIRIIAPYRRMGVKIISEQGTGTFVSHAQLPKGTRPLTLNFDQQCWQPADAIKLNQMLSLQPCSNTPPQWRLFRDGEYTLQIDTRSGTPTLMISIQNGGETVCSLVRSISPGVDKTHDDELDRHSFNDYINFSDKTGWDKWWGKNWIRTDIGDYDNPGFDDLTMSLAFLPDIKTESTTASGLPVFYKNKMDTHAKAIDGYTPRDYLTHWLSQWVRDYGIDGFRVDTAKHVELPAWQQLKTEASAALREWKKANPDKALDDKPFWMTGEAWGHGVMQSDYYRHGFDAMINFDYQEQAAKAVDCLAQMDTTWQQMAEKLQGFNVLSYLSSHDTRLFREGGDKAAELLLLAPGAVQIFYGDESSRPFGPTGSDPVQGFPFDLQYFTTLFKSAQLIYIQLKAPACQFFSDCVWLITQQIGIEHAYPVLIELNGRCGHSLRPQGYSNNITATITLTVAFYGAILILFSQPGELFANLAFKAPVCREIIACLCYFRREVNLTGSISVRFIMSVTIFLPVAHFLH

SEQ ID NO: 59256 - protein, 81 aa, Homo sapiens
  misc_feature (1)...(81): Xaa = X or * as defined in Table 2
RTYRLAGRQKQRRGGGTDSRSQNPWRSHRRHLPXRSSGAGKRGGKRFAGGAERRNPRLCRKPEPPAGGDGRRRRLAAAGAD

SEQ ID NO: 59257 - protein, 69 aa, Homo sapiens
KGFSPSLLPLPAANLQNDGAGQRETGGRAEGPEGDVGEVRLPPSHTCFASQQGLRVQRGRKMVGRGVCR

SEQ ID NO: 59258 - protein, 14 aa, Homo sapiens
PCQYPVLAPSDPPL

SEQ ID NO: 59259 - protein, 44 aa, Homo sapiens
  misc_feature (1)...(44): Xaa = X or * as defined in Table 2
PECLSAPDHXYKHCCSTGTQARQPDADCPLLPPRLAAHNERQTR

SEQ ID NO: 59260 - protein, 545 aa, Homo sapiens
  DOMAIN (140)..(172): ABC transporters family proteins domain identified by eMATRIX, accession number BL00211B, p-value=8.412e-24, raw score of 13.37
  DOMAIN (25)..(218): ABC transporter domain identified by PFam, accession name ABC_tran, E-value=1.9e-49, PFam score of 177.7
  misc_feature (1)...(545): Xaa = X or * as defined in Table 2
MCCNRCRNYAPGKGFSDVSFDLWPGEVLGIVGESGSGKTTLLKSISARLTPQQGEIHYENRSLYAMSEADRRRLLRTEWGVVHQHPLDGLRRQVSAGGNIGERLMATGARHYGDIRATAQKWLEEVEIPANRIDDLPTTFSGGMQQRLQIARNLVTHPKLVFMDEPTGGLDVSVQARLLDLLRGLVVELNLAVVIVTSSPDQDWGFTPEPRLAARFPGSTHSSRSRRNRGRRHPRPRSLPTPSAPHSRAPGDGVKLVPPPARVTRNEPAPSDSVTLGVPHEPGACIGTPILTFVRPSTSAINAAAEESTGTILFGAGGFKRTDLNDTESDSTTLVASRYWDLSSGWQRAINLRWSLDHFTQGEITNTTMLFYPGVMISRTRSRGGLMPTWGDSQRYSIDYSNTAWGSDVDFSVFQAQNVWIRTLYDRHRFVTRGTLGWIETGDFDKVPPDLXLKSRVGQRSELGSQYTPRARVEPPKLLSRKVRAHFGSRAPGAGRAXRHLRAPDCGVRWVWAGSGAGDGGGRGCGGSGTSEWILGSGRRGEALG

SEQ ID NO: 59261 - protein, 14 aa, Homo sapiens
PCQYPVLAPSDPPL

SEQ ID NO: 59262 - protein, 92 aa, Homo sapiens
  misc_feature (1)...(92): Xaa = X or * as defined in Table 2
CSRCSIPAFRVKPAPLKPRVFSPAWNVPERLWHLAPSTFSGGEQQRVNIARELYRRLPHSAAXRNYRLPXRQNSAALSRLYAAFLPRPQYHH

SEQ ID NO: 59263 - protein, 45 aa, Homo sapiens
SRASSHPPERAGTPVAPGTIDIFRWRTAARQHRPRLYRRLPHSAA

SEQ ID NO: 59264 - protein, 137 aa, Homo sapiens
ICICSQNTAVAPGEETQIRRYFSKSPVSIQPSVPRVTKHGDRTVCGSRRSAREELGIEATVGEYVASHQREVSGRIIHLHAWHVPDFHGTLQAHEHQALVWCSPEEALQYPLAPADILLVTAPARKVVEIRKPPSAG

SEQ ID NO: 59265 - protein, 337 aa, Homo sapiens
MVLEDLIGQFLYGSKGDDNKNSGDAPAAAPGNNETTEPENRRMFKRLMMVALLVIAPLSAATAADQTNPYKLMDEAAQKTFDRLKNEQPQIRANPDYLRTIVDQELLPYVQVKYAGALVLGQYYKSATPAQREAYFAAFREYLKQAYGQALAMYHGQTYQIAPEQPVGDKTIVPIRVTIIDPNGRPPEVIGEAYRHKMLFVISQSDKAEPTSGGNILSTEQKQNISRKICLLHELFQPVHPVCAVSVRLQWGLRVMAERMIKCLPREASSPVVALLQHPFRTTVAREQARDDFGETVGAILDTVSTFPLIPAPVRTIIQAVRSSVVSVARAVWDFFF

SEQ ID NO: 59266 - protein, 365 aa, Homo sapiens
  DOMAIN (157)..(176): Phosphoribulokinase proteins domain identified by eMATRIX, accession number BL00567A, p-value=9.862e-10, raw score of 10.66
MEHFGRNDHVFTTGEIPQCATDDLFAAAVRITVGGIKEIYAAFQCTFNYGTAAFFRQCPCVITTLEIPTYRAVSETTGEILFDLLCANGPEWNRFVTLEMKYGRIMLDTAKIIDEQDVPTHILSKLTFTLRNHPEYLEASVLSPDDQINQLTHYEPVIGIMGKTGAGKSSLCNALFAGEVSPVSDVAACTRDPLRFRLQIGEHFMTIVDLPGVGESGVRDTELSALYREQLPRLDLILWLIKADDRALATDEHFYRQVIGEAYRHKMLFVISQSDKAESTSGGNILSTEQKQNISRKICLLHELFQPVWSVCAVSVRLQWGLRQTTNQSTFAVIDATTGQKTQQAFMLLRNHPGFDAAFIGDLLC

SEQ ID NO: 59267 - protein, 830 aa, Homo sapiens
  DOMAIN (1)..(196): Dehydratase family domain identified by PFam, accession name ILVD_EDD, E-value=4.7e-08, PFam score of -153.9
MCSHAAGCTIPDVEHWTRINRKVPRLVSVLPNGPDYHPTVRAFLAGGVPEVMLHLRDLGLLHLDAMTVTGQTVGENLEWRPEPGAFRQCLREQDGVEPDDVILPPEKAKAKGLTSTVCFPTGNIAPEGSVIKATAIDPSVVGEDGVYHHTGRVRVFVSEAQAIKAIKRVVIVACGFSPTRTAHAASDIDITNTVDLRNRRSQLRRGEIVQFTLRISIGRQREDHNWRIRRVRFATRSGGWTSHWQQTLCSVDRRLHITRCAVDIPVQIKLRNNTPAAERTSGGHVTDSGQCAQVERSSSVATEDGNCFCRRTGQEALTMRTGKSTCGQREDRQHTEAQSGVRDTEYRALYREQLPRLDLILWLIKADYRALATDEHFYRQVIGEAYRHKMLFVISQSDKAEPTSGGNILSTEQKQNISRKICLLHELFQPVHPWGLRVMAERMIKCLPREASSPVVALLQHPFRTTVAREQARDDFGETVGAILDTALLLEQQDGKTLASVQTLDESRLPEGDVTVDVHWSSLNYKDALAITGDTSRMSHPAGFDTAAAWLCDYRRRTDNRAFRHPTLLTIAQQRCHVYPQMLPQQIQHCRFYPGNYMNSGTITIGKSITHQRQNVFVFTQRFTYHQRNRIFQRFTDFLAAGNFPYASVTRIIFDNHNITRKERINDGRKRDVYGQRSSRGSGTASDLRRYAHRQADVYRPHVPFVPVPSPVPAQTGRIRNGNFSVFNLQRILGQRQSPSCQIQWVSIAVGLPGAAAPTWVNIAREISKWLLEWQPQVSPQSSQSAPHGLHRKASRSADRTLEIPEYRARIRVTDCVADKLKTTFFQCLR

SEQ ID NO: 59268 - protein, 293 aa, Homo sapiens
  DOMAIN (44)..(63): Phosphoribulokinase proteins domain identified by eMATRIX, accession number BL00567A, p-value=9.862e-10, raw score of 10.66
MPGGVVMKNFEVLQPLQNSLSGLPLWVSERILQQINQLTHYEPVIGIMGKTGAGKSSLCNALFAGEVSPVSDVAACTRDPLRFRLQIGEHFMTIVDLPGVGESGVRDTEYAALYREQLPRLDLILWLIKADDRALATDEHFYRQVIGEAYRHKMLFVISQSDKAEPTSGGNILSTEQKQNISRKICLLHELFQPVHSVCAVSVRLQWGLMVMAERMIKCLPREASSPVVALLQHPFRTTVAREQARDDFGETVGAILDTVSTFPLIPAPVRTIIQAVRSSVVSVARAVWDFFF

SEQ ID NO: 59269 - protein, 439 aa, Homo sapiens
MNIRRKNRLWIACAVLAGLALTIGLVLYALRSNIDLFYTPGEILYGKRETQQMPEVGQRLRVGGMVMPGSVQRDPNSLKVTFTIYDAEGSVDVSYEGILPDLFREGQGVVVQGELEKGNHILAKEVLAKHDENYTPPEVEKAMEANHRRPARPSIMMPEIGNGLLCLALGIALLLSVYPLWGVARGDARMMASSRLFAWLLFMSVAGAFLVLVNAFVVNDFTVTYVASNSNTQLPVWYRVAATWGAHEGSLLLWVLLMSGWTFAVAIFSQRIPLDIVARVLAIMGMVSVGFLLFILFTSNPFSRTLHLAYPNRCQPINWRGRHLVWYLLLFVISLWLQLGLPDELSRFTPFCLALPIIALAWHYGWQGALIATLMNAIALIASQTWRDHPVDLLLSLLVQSLTGLLLGAGIQRLRELNQSLQKELARNQHLAERVLETE

SEQ ID NO: 59270 - protein, 63 aa, Homo sapiens
  misc_feature (1)...(63): Xaa = X or * as defined in Table 2
YAARRRALCGSPCPFPGGCNGENCRLPPQLHADLTARIFYETRGWWWWSPRRWILNEXLPGWQ

SEQ ID NO: 59271 - protein, 56 aa, Homo sapiens
  misc_feature (1)...(56): Xaa = X or * as defined in Table 2
AQTSPDCGRCPWLSDYAKSGXHQLWARWQNNGLAHTPRADSTHQQSALDGRISSLT

SEQ ID NO: 59272 - protein, 147 aa, Homo sapiens
  DOMAIN (49)..(99): Sugar transport proteins domain identified by eMATRIX, accession number BL00216B, p-value=5.350e-10, raw score of 27.64
  misc_feature (1)...(147): Xaa = X or * as defined in Table 2
PLLVWINTRPSLTTGRESASPATLVCHATVPSLVIASHVLSFLXWSFTVLVISRIGVAFAHAIFWSITASLAIRMAPAGKRAQALSLIATGTALAMVLGLPLGRIVGQYFGWRMTFFAIGIGALITLLCLIKLLPLLRRTVKYTSGC

SEQ ID NO: 59273 - protein, 773 aa, Homo sapiens
MFTYPHSKFRVNRFVGQVLLIEFSILLDGGRTGLGHSLSVWCISGDCSSFLQGKPTSLPLRKPSAIICSDSLSGSADLLRNHNFVCTAADTFTTDITPEAGDARLIGIAQTVRHLEDPMRAWKSIHKSCEILDPIHRAPVKENTHPARKINISDPAAGAVARIRYEGVLSVCRASASAYVSRSRTITVACWYVSNTGVTGATIGVKRQHRHARLFSGDGAPGFGTGKRDIRQLRRLVRIQIQRTFFAAVLHVPTPWSRAIDAAALLTVIDVKVLTACACQACRTLALRVAQVIDRCSNPGDIMSSVARRYWFISRWSAKRDCAVSYDQDPGQAQRSCRSCLVAVDRGLWLSAYCRSLMTQTLLPDDVPRILPNASSPSRLRCLQHLGNYRLLDLRKLIWLHRSQFSLCGWEKRLVKDLTRIQDTGRAKEILGATATLEFRLVNTNVDQAAAASGRVPGDSEVKQTREGQPVVLYKRVILTGDHITDSTSSQDEYNQPQVNISLDSAGGNIMSNFTKDNIGKPMATLFVEYKDSGKKDANGRAVLVKQEEVINIANIQSRLGNSFRITGINNPNEARQLSLLLRAGALIAPIQIVEERTIGPTLGMQNIEQGLEACLAGLLVSILFMIIFYKKFGLIATSALIANLILIVGIMSLLPGATLSMPGIAGIVLTLAVAVDANVLINERIKEELSNGRTVQQAIDEGYRGAFSSIFDANITTLIKVIILYAVGTGAIKGFAITTGIGVATSMFTAIVGTRAIVNLLYGGKRVKKLSI

SEQ ID NO: 59274 - protein, 63 aa, Homo sapiens
  misc_feature (1)...(63): Xaa = X or * as defined in Table 2
STSSLAAQSLRFGYETSQTGLATYCGEKIQXFFADLQQPVCADSYPLLVQMKKLGPIVFFFDI

SEQ ID NO: 59275 - protein, 92 aa, Homo sapiens
  DOMAIN (38)..(51): glpT family of transporters proteins domain identified by eMATRIX, accession number BL00942A, p-value=8.714e-15, raw score of 9.61
GLMMLPFLKAPADAPLMTDKYEIDARYRYWRRHILLTIWLGYALFYFTRKSFNAAVPEILANGVLSRSDIGLLATLFYITYGVSKFVSGIVS

SEQ ID NO: 59276 - protein, 98 aa, Homo sapiens
DCFLRRLIKRPFGTSMKDQAVRFEEGFMAMGALGLAMVGMTALAPVLAHVLGPVIIPVYEMLGANPSMFAGTLLAWIWAAVFLAKELAGGVRLLVLIF

SEQ ID NO: 59277 - protein, 854 aa, Homo sapiens
  DOMAIN (258)..(301): glpT family of transporters proteins domain identified by eMATRIX, accession number BL00942B, p-value=1.000e-40, raw score of 20.36
  DOMAIN (226)..(638): Sugar (and other) transporter domain identified by PFam, accession name sugar_tr, E-value=0.011, PFam score of -117.3
LRSSLKPGKGRRRCCAILIVICKAKRRLSKPRRPMMKRWLPVTRKLWRVDIGQTITAIRTQAGIVQRLAADNASVKQSGQLIEQLSLGVYDAVRRLLGRLRPRQLDDLTLEQAIRSLMREMELEGRGIVSHLEWRIDESALSENQRVTLFRVCQEGLNNIVKHADASAVTLQGWQQDERLMLVIEDDGSGLPPGLMMLPFLKAPADAPLMTDKYEIDARYRYWRRHILLTIWLGYALFYFTRKSFNAAVPEILANGVLSRSDIGLLATLFYITYGVSKFVSGIVSDRSNARYFMGIGLIATGIINILFGFSTSLWAFAVLWVLNAFFQGWGSPVCARLLTAWYSRTERGGWWALWNTAHNVGGALIPIVMAAAALHYGWRAGMMIAGCMAIVVGIFLCWRLRDRPQALGLPAVGEWRHDALEIAQQQEGAGLTRKEILTKYVLLNPYIWLLSFCYVLVYVVRAAINDWGNLYMSETLGVDLVTANTAVTMFELGGFIGALVAGWGSDKLFNGNRGPMNLIFAAGILLSVGSLWLMPFASYVMQATCFFTIGFFVFGPQMLIGMAAAECSHKEAAGAATGFVGLFAYLGASLAGWALGKVLDSKPSHSQKLEPKIKFNLGAHEVATHKGRAQERIHGNAGTGKRRPARKDNRGIGSPYRRARGQTQIKRRYPNGLVVDQAGWCRPRVRWKERREDEERRKEGERREERRRRGGNDKREEAEKTRKKKKKEREREGGGDDKRKKTQANWVGAEPRSANAGLTVLWLSQPETSMAGTPLTRHSNRHKTQTQSGPRSQTDDENSTQTAARSKEQQKSKTRAAARGTAEATEVNPDADSPSLPGALSTGSQAFSANAAA

SEQ ID NO: 59278 - protein, 30 aa, Homo sapiens
RPASRPVTKFDQRGHRLGHGVWNLMFERVK

SEQ ID NO: 59279 - protein, 48 aa, Homo sapiens
YAEHMLEVMSSIGDYTNPRPASRPVTKFDQRGHRLGHGVWNLMFERVK

SEQ ID NO: 59280 - protein, 66 aa, Homo sapiens
TRDETCRQIGKCTEEHQAIVRKWLEERKLDEAWKDARSSRRDKVFTPHPAWKTRTLLSIWGQQMLA

SEQ ID NO: 59281 - protein, 241 aa, Homo sapiens
TFMKNDVISPEFDENGRPLRRIRSFVRRQGRLTKGQEHALENYWPVMGVEFSEDMLDFPALFGREAPVTLEIGFGMGASLVAMAKDRPEQDFLGIEVHSPGVGACLASAHEEGLSNLRVMCHDAVEVLHKMIPDNSLRMVQLFFPDPWHKARHNKRRIVQVPFAELVKSKLQLGGVFHMATDWEPYAEHMLEVMSSIDGYKNLSESNDYVPRPASRPVTKFEQRGHRLGHGVWDLMFERVK

SEQ ID NO: 59282 - protein, 84 aa, Homo sapiens
  DOMAIN (32)..(59): IRON-SULFUR ELECTRON TRANSPORT AROMATIC HYDROCARB domain identified by eMATRIX, accession number PD02042A, p-value=6.538e- 22, raw score of 21.13
  DOMAIN (26)..(84): Rieske [2Fe-2S] domain identified by PFam, accession name Rieske, E-value=4.9e-16, PFam score of 66.7
PECTVLMNRIYACPVADVPEGEALRIDTSPVIALFNVGGEFYAINDRCSHGNASMSEGYLEDDATVECPLHAASFCLKTGKALC

SEQ ID NO: 59283 - protein, 491 aa, Homo sapiens
  DOMAIN (1)..(51): Type III leader peptidase family domain identified by PFam, accession name Peptidase_C20, E-value=5.5e-21, PFam score of 80.6
MLFDVFQQYPTAMPVLATVGGLIIGSFLNVVIWRYPIMLRQQMAEFHGLSTVGHSYPNPVLQMLLSPDFQNKFRQREKISVRLYKILVIVYGHQTSVFIPRIEFGHTADIILQPGVNGIFNHQRKERTFLMLAPRFVQMMIKLLNGKYSFLYRIFKTTAGTRTVVDFAGFTVVNTGALTNVYAHGNDGTFFDNHPFNHFRARADEAIIFNDGWVSLQRFQHAADAHATGKVEVLESHGVPTVNKVQLGTTPVVRGAITSGELDIYPEYTGNGAFFFKDENDAAWKNAQQGYEKVKKLDSEHNKLIWLTPAPANNTWTIAVRQDVAEKNKLTSLADLSRYLQEGGTFKLAASAEFIERADALPAFEKAYGFKLGQDQLLSLAGGDTAVTIKAAAQQTSGVNAAMAYGTDGPVAALGLQTLSDPQGVQPIYAPAPVVRESVLREYPQMAQWLQPVFASLDAKTLQQLNASIAVEGLDAKKVAADYLKQKGWTK

SEQ ID NO: 59284 - protein, 240 aa, Homo sapiens
  DOMAIN (160)..(187): IRON-SULFUR ELECTRON TRANSPORT AROMATIC HYDROCARB domain identified by eMATRIX, accession number PD02042A, p-value=6.538e- 22, raw score of 21.13
  DOMAIN (154)..(215): Rieske [2Fe-2S] domain identified by PFam, accession name Rieske, E-value=5.6e-20, PFam score of 79.8
MAYGTDGPVAALGLQTLSDPQGVQPIYAPAPVVRESVLREYPQMAQWLQPVFASLDAKTLQQLNASIAVEGLDAKKVAADYLKQKGQDVAFRSQQAQRACRTGLQENKWRTASNGAGTVDASPAAQRVAGCTVLMNRIYACPVADVPEAEALRIDTSPVIALFNVGGEFYAINDRCSHGNASMSEGYLEDDATVECPLHAASFCLKTGKALCLPATDPLTTYPVHVEGGDIFIDLPEAQP

SEQ ID NO: 59285 - protein, 54 aa, Homo sapiens
EYARCAAALYTVRAKLNRLPPRQCRNVYARQARRQAPENLNDGLPSRRLPYRNK

SEQ ID NO: 59286 - protein, 833 aa, Homo sapiens
  DOMAIN (256)..(297): glpT family of transporters proteins domain identified by eMATRIX, accession number BL00942E, p-value=1.628e-33, raw score of 21.14
  DOMAIN (719)..(810): 6-pyruvoyl tetrahydropterin synthase domain identified by PFam, accession name PTPS, E-value=1.6e-36, PFam score of 134.8
MQRRDGDIALIYRSKIGPRTSITFTARRANPVQRIAARILLRDHLICRMSCTAARHANTFDLIQGSGADNFAAIYGGANDRITRADAAVAGAGNWHRFGISNGKLSPRSITRTSSPARAMTKMPYNPQASGGSNLAVSNPELDKLIAARVAALRAANPDASASVPVELVTASASYPRSLMRCNRILSPGSARGQMIITALFIYAGNPIACVAALEVLKVFEQENLLQKANDLGQKLKDGLLAISFWRAKWLKIFVVCGAEIFVEYVLKNKVIWLLCFANIFLYVVRIGIDQWSTVYAFQELKLSKAVAIQGFTLFEAGALVGTLLWGWLSDLANGRRGLVACIALALIIATLVIPFHMVFHPNEQYAYCVNELNSSVDVWELKDPHGNIECVQTLDMMPENFSDTRWAADIHITPDGRHLYACDRTASLITVFSVSEDGSVLSKEGFQPTETQPRGFNVDHSGKYLIAAGQKSHHISVYEIVGEQGLLHEKGRYAVGQGPDVGGLTIAVTAHEGDIFTEQFKQRFNTFKYRFITANHNRQEAPPRSRKKSGRVCAAAGGAGAAAIMLLPVFTLKLRHKISPRMVAIGRYDGTHPCLAAATQTGKSLINRCGIQFDVRVRFFQRSDTFWRSYQHQNFDAAAARFFQQVDGRDNGTTGCQHWVNDQRHTLIDVRNQFLEDPLKFEKDKIKGAIRTDFILSAEIVAITLGIVDAKAGRKEIMMSTTLFKDFTFEAAHRLPHVPEGHKCGRLHGHSFMVRLEITGEVDPHTGWIIDFAELKAAFKPTYERLDHHYLNDIPGLAGALATEYAPGRDARRYAAPLRLSHAVPSGTAGSR

SEQ ID NO: 59287 - protein, 647 aa, Homo sapiens
  DOMAIN (156)..(196): Amino acid permeases proteins domain identified by eMATRIX, accession number BL00218E, p-value=8.200e-34, raw score of 23.30
  DOMAIN (1)..(321): Amino acid permease domain identified by PFam, accession name aa_permeases, E-value=1.4e-38, PFam score of 141.6
  misc_feature (1)...(647): Xaa = X or * as defined in Table 2
MHPRFQTAFAQLADNLQSALEPILADKYFPALLTGEQVSSLKSATGLDEDALAFALLPLAAACARTPLSNFNVGAIARGASRRSAKNIPRAVRQVFWRILLFYVFAILIISLIIPYTDPSLLRNDVKDISVSPFTLVFQHAGLLSAAAVMNAVILTAVLSAGNSGMYASTRMLYTLACDGKAPRIFAKLSRGGVPRNALYATTVIAGLCFLTSMFGNQTVYLWLLNTSGMTGFIAWLGIAISHYRFRRGYVLQGHDINDLPYRSGFFPLGPIFAFILCLIITLGQNYEAFLKDTIDWGGVAGTYIASGGEPAVNSHAFGVLRNVVSIAVFFHQFGDAIKRLFPTDLLPFIRTWRTVFRKLQTAFGVDEIHQASAFRTKCTAVDRVIRIAFDMDRLDFFSWRSGYISRIPLIGLYFACALERHQNERQPIILLSDQNAIATINQLAIERDVLNCRVIIARSLSELVAIREEIEPLLIINNSHYLLDDAVNNYITVKNIITAAGIEQIKHFLATAFIRQQPERFFSAPGSFHYSNVRGESWQHITRQICAQLVAQHHITADEAQRIIAREGEGENLIVNRLAIPHCWSEQERRFRXTVAWWRAAXCAVCDDGDCRSVLPDLHVWQPDGIPVAAEHLRDDGFYRLAGDCH

SEQ ID NO: 59288 - protein, 149 aa, Homo sapiens
  DOMAIN (11)..(26): CYTIDINE DEAMINASE HYDROLASE ZINC AMINOHY domain identified by eMATRIX, accession number PD02269D, p-value=5.781e-13, raw score of 11.98
GILLPGREAHALRDYLPDAFGPKDLEIKTLLMDEQDHGYALTGDALSQAAIAAANRSHMPYSKSPSGVALECKDGRIFSGSYAENAAFNPTLPPLQGALILLNLKGYDYPDIQRAVLAEKADAPLIQWDATSATLKALGCHSIDRVLLA

SEQ ID NO: 59289 - protein, 1227 aa, Homo sapiens
  DOMAIN (1191)..(1217): Bacterial chemotaxis sensory transducers proteins domain identified by eMATRIX, accession number BL00538E, p-value=3.813e- 26, raw score of 10.52
  DOMAIN (1020)..(1154): Tar ligand binding domain homologues domain identified by PFam, accession name TarH, E-value=1.3e-52, PFam score of 188.2
MCELDILHDSLYQFCPELHLKRLNSLTLACHALLDCKTLTLTELGRNLPTKARTKHNIKRIDRLLGNRHLHKERLAVYRRHASFICSGNTMPIVLVDWSDIREQKRLMVLRASVALHGRSVTLYEKASSYGAEQYALVVGSDVLARTCDPTDRGTIIIFGDGAGAAVLAASEEPGIISTHLHADGSYGELLTLPNFFRVNPENSIHLTMAGNEVFKVAVTELAHIVDETLAANNLDRSQLDWLVPHQANLRIISATAKKLGMSMDNVVVTLDRHGNTSAASVPCALDEAVRDGRIKPGQLGSQTVGMLADMAASYPIVEETFAEASAALGYDLWALTQQGPAEELNKTWQTQPALLTASVALYRVWQQQGGKAPAMMAGHSLGEYSALVCAGVIDFADAVRLVEMRGKFMQEAYRKARALWRQSSVWMMRLLRKRVKKLQKVVIAGHKEAVERVALPVKRRRKTRAAVTMSVPSHCALMKPAADKLAVELAKITFNAPTVPVVNNVDVKCETNGDAIRDALFIIEGALVVVSHDRHLLRSTTDDLYLVHDRKVEPFDGDLEDYQQWLSDVQKQENQTDEAPKENANSAQARKDQKRREAELRAQTQPLRKEIARLEKEMEKLNAQLAQAEEKLGDSELYDQSRKAELTACLQQQASAKSGLEEPKQLMAQITTTDANEFSSSAEFIPMRGFSNCHLQTMLPRLFRRQVKFTPYWQRLELPDGRFVDLRGVKTLHRAHINLVCGDPNRMHRIYHSGETEDASWFLRWLQREFGHAPTAAVGYSLGGNMLACLLAKEGNDLPVDAAVIVSAPFMLEACSYHMEKGFSRVYQRYLLNLLKANAARKLAAYPGTLPINLAQLKSVRRIREFDDLITARIHGYADAIDYYRQCSAMPMLNRIAKPTLIIHAKDDPFMDHQVIPKPESLPPQVEYQLTEHGGHEAVLEWLQVAKRAGLVVGQIGRTVLRERVRIEIASTHIALAARHSDWRCCRNGRYPARGPAIGSNGMSFWAFRDDLQRLNQVEQSNQQRAALAQTRAVLLQASTALNKAGTLTALSYPADDIKTLMTTARASLTQSTTLFKSFMAMTAGNEHVRGLQKETEKSFARWHNDLEHQATWLESNQLSDFLTAPVQGSQNAFDVNFEALQLEINHVLEAANQYSGPECGSGSARAGEQGRGFAVVAGEVRNLASRSAQAAKEIKGLIEESVNRVQQGSKLVNNAAATMIDIVSS

SEQ ID NO: 59290 - protein, 77 aa, Homo sapiens
  misc_feature (1)...(77): Xaa = X or * as defined in Table 2
LLVFINQEEADFHTQRGGPVFQQATFTLXQLALFAIEPGLMTDPDIQVRGTTLPYGRGAAHGVYTSNWKLTFRRILY

SEQ ID NO: 59291 - protein, 954 aa, Homo sapiens; identical to SEQ ID NO: 46296
  DOMAIN (602)..(617): ADRENODOXIN REDUCTASE FAMILY SIGNATURE domain identified by eMATRIX, accession number PR00419D, p-value=1.000e-10, raw score of 10.62
  DOMAIN (574)..(727): Pyridine nucleotide-disulphide oxidoreducta domain identified by PFam, accession name pyr_redox, E-value=6.3e-21, PFam score of 73.5

SEQ ID NO: 59292 - protein, 521 aa, Homo sapiens; identical to SEQ ID NO: 46297
  DOMAIN (136)..(179): GLYCINE DEHYDROGENASE DECARBOXYL domain identified by eMATRIX, accession number PD00545E, p-value=1.000e-40, raw score of 16.16
  DOMAIN (299)..(502): Pyridine nucleotide-disulphide oxidoreducta domain identified by PFam, accession name pyr_redox, E-value=8.9e-18, PFam score of 62.9

SEQ ID NO: 59293 - protein, 262 aa, Homo sapiens
  DOMAIN (74)..(101): CYTIDINE DEAMINASE HYDROLASE ZINC AMINOHY domain identified by eMATRIX, accession number PD02269B, p-value=5.400e-20, raw score of 18.48
  DOMAIN (62)..(130): Cytidine and deoxycytidylate deaminase domain identified by PFam, accession name dCMP_cyt_deam, E-value=0.0011, PFam score of 23.7
  misc_feature (1)...(262): Xaa = X or * as defined in Table 2
LAICTGTYSGRQVLPRFVDRGASLIAEERNGAGRRRAGIRTTSAGGGLCAYAIVEFXCWRNCARFELNAGISVPISEFIGATMQQTVHAEQSAISHAWLSGEKALAAITVNYTPCGHCRQFMNELNSGLDLRIHLPGREAHALRDYLPDAFGPKDLEIKTLLMDEQDHGYALTGDALSQAAIAAANRSHMPYSKSPSGVALECKDGRIFSSEYAENAAFNPTPDIQRAVLAEKADAPLIQWDATSATLKALGCHSIDRVLLA

SEQ ID NO: 59294 - protein, 1033 aa, Homo sapiens; identical to SEQ ID NO: 46310
  DOMAIN (476)..(508): Bacterial-type phytoene dehydrogenase proteins domain identified by eMATRIX, accession number BL00982A, p-value=2.726e- 13, raw score of 18.41
  DOMAIN (475)..(626): Pyridine nucleotide-disulphide oxidoreduc domain identified by PFam, accession name pyr_redox, E-value=5.6e-15, PFam score of 53.4

SEQ ID NO: 59295 - protein, 273 aa, Homo sapiens
GTARNLTVSLSLSYSSSGTPSNAPNARMEELGPHPGEASSLFHPESPLLDELFLPEYKAGRTPNPDIGHYVRRADVDGKSRLLRGLDSNKDQSYFLYTLSHEQIAQSLFPVGELEKPQVRKIAEDLGLVTAKKKDSTGICFIGERKFREFLGRYLPAQPGKIITVDGDEIGEHQGLMYHTLGQRKGLGIGGTKEGTEEPWYVVDKDVENNILVVAQGHEHPRLMSVGLIAQQLHWVDREPFTGTMRCTVKTRYRQTISLGPLRKPPHNRCLEI

SEQ ID NO: 59296 - protein, 267 aa, Homo sapiens
QTVLVWQSEIDNRNIRYMFIEIIIGFFGIFCVIDLMTSILNHRDSSTNIVSRRHRFQAGFLFFWQRQTIDKLLHAFGVNALTASQLFQLLVRFFDAIATHNCLDWFSQHFPLVIPFIPQMVAGHFQLVTPHQVLMYHTLGQRKGLGIGGTKEGTEEPWYVVDKDVENNILVVAQGHEHPRLMSVGLIAQQLHWVDREPFTGTMRCTVKTRYRQTDIPCTVKALDDDRIEVIFDEPVAAVTPGQSAVFYNGEVCLGGGIIEQRLPLPV

SEQ ID NO: 59297 - protein, 232 aa, Homo sapiens
KRAFLCSFCANRRNAANSALALPGNCPVAHAQKRHSAPGTLSPDARNEKQPLYGGAAPETPNPRLPPLDSGILGGYIAPDNLTITLSVGHSLFDERFGLAPQMPKKLQKMTRFPNDSLDAALCHGDVLLQICANTQDTVIHALRDIIKHTPDLLSVRWKREGFISDHAARSKGKETPINLLGFKDGTANPDSQNDKLMQKVVWVTADQQEPAWTIGGSYQAVRLNQFRSVMN

SEQ ID NO: 59298 - protein, 279 aa, Homo sapiens
MNEIIYCGWTPLNHRDFADFGTTIKQDFRLLGQTSVDRLLQLSQGQAVKGNQLLPVSLVKRKTTLAPNTQTASPRALADSLMQLARQVSRLESGQRTANPDSQNDKLMQKVVWVTADQQEPAWTIGGSYQAVRLIQFRVEFWDRTPLKEQQTIFGRDKQTGAPLGMQHEHDVPDYASDPEGKVIALDSHIRLANPARRRGFCRFRNHHQTGFSPAGANQRGPLAATLSGPGGEGQSAVARLTGEKKNHPGAQYANRLSPRVGRFINAAGTTGFPTGKRA

SEQ ID NO: 59299 - protein, 567 aa, Homo sapiens
  DOMAIN (442)..(487): PROTEIN OXIDOREDUCTASE NAD INTERGENIC RE domain identified by eMATRIX, accession number PD01311A, p-value=3.625e-35, raw score of 30.23
  DOMAIN (379)..(567): Oxidoreductase family domain identified by PFam, accession name GFO_IDH_MocA, E-value=2.8e-45, PFam score of 163.8
MPFLLSFPSERKRLGIGQSQEMNTLFRFWSFFLRDHFNKKMYEEFKQLALEERYRSSIDSVSHCSFRSLSPVSPWVTADQQEPAWTIGGSYQAVRLIQFRVEFWDRTPLKEQQTIFGRDKQTGAPLGMQHEHDVPDYASDPEGKVIALDSHIRLANPRTAESESSLMLRRGYSYSLGVTNSGQLDMGLLFVCYQHDLEKGFLTVQKRLNGEALEEYVKPIGGGYFFAPRKKGKSEESRFSHLTSLPQQLPSQQLMSKDQDEQEELDFLFDEEMEHSHGMTLNSLVSGGCVISGSVVVQSVLFSRVRVNSFCNIDSAVLLPEVWVGRSCRLRRCVIDRACVIPEGMVIGENAEEDARRFYRSEEGIVLVFVKSAMTSSPLRVAIIGAGQVADKVHASYYCTRNDLELVAVCDSRLSQAQALAEKYGNASVWDDPQAMLLAVKPDVVSVCSPNRFHYEHTLMALEAGCHVMCEKPPAMTPEQAREMCDTARKLGKVLAYDFHHRFALDTQQLREQVTNGVLGEIYVTTARALRRCGVPGWGVFTNKELQGGGPADRHRHSYASLDLSCC

SEQ ID NO: 59300 - protein, 197 aa, Homo sapiens
PAMKSLSRAYRGRPDSQNDKLMQKVVWVTADQQEPAWTIGGSYQAVRLIQFRVEFWDRTPLKEQQTIFGRDKQTGAPLGMQHEHDVPDYASDPEGKVIALDSHIRLANPRTAESESSLMLRRGYSYSLGVTNSGQLDMGLLFVCYQHDLEKGFLTVQKRLNGEALEEYVKPIGGGYFFALPGVKDANDYFGSALLRV

SEQ ID NO: 59301 - protein, 245 aa, Homo sapiens
  DOMAIN (75)..(117): D-isomer specific 2-hydroxyacid dehydrogenases NAD-binding si domain identified by eMATRIX, accession number BL00065A, p-value= 8.258e-20, raw score of 31.92
  DOMAIN (76)..(172): D-isomer specific 2-hydroxyacid dehydrogen domain identified by PFam, accession name 2-Hacid_DH, E-value=2.9e-58, PFam score of 143.0
  misc_feature (1)...(245): Xaa = X or * as defined in Table 2
MKPSVILYKALPDDLLQRLQEHFTVHQVANLSPQTVEQNAAIFAEAEGLLGSNENVNAALLEKMPKLRATSTISVGYDNFDVDALTARKILLMHTPTVLTETVADTLMALVLSTARRVVEVAERVKAGEWTASIGPDWYGTDVHHKTLGIVGMGRIGMALAQRAHFGFNMPIRLXRAPPPXRSRRTLQRPLLRFGYSVTRVRFRLPDPAVNXXDASSVWRRTIRGPSLGLSPGWNTRVSLCAFFG

SEQ ID NO: 59302 - protein, 452 aa, Homo sapiens
MPSYFTSRIAAVHVSALREEQAHHESKHHESFIAQRMFRMFYQARNLLHAGQENLFSGLTALTAEFTVGEEATRGKTTGKRGPSPDGRILRTTKTRNPRGYMQGRYLESQRDVEATDKPFEFFMNRFRLLEAAPRVEFIAYTGLCEDVIRPQLDEAIAQGYLTECADYWQITEHGKLFLNSLLELFLADGYHMWRMIGAGAHLAVGIDPTQLFLCQFEAVRKLLGNDQRAHLLPLGIEQLPALKAFDTVFSMGVLYHRRSPLEHLWQLKDQLVNEGELVLETLVIDGDENTVLVPGDRYAQMRNVYFIPSALALKNWLKKCGFVDIRIADVSVTTTEEQRRTEWMVTESLADFLDPHDPGKTVEGYPAPKRAVSDCAQAVKMTNMISYQGLVRTFLSTSPNNWLVFMQNGQEVVIDSGKSVSLTLTMAPAFKDEGELTDMTDITGNLTVQNL

SEQ ID NO: 59303 - protein, 351 aa, Homo sapiens
  DOMAIN (252)..(277): D-isomer specific 2-hydroxyacid dehydrogenases NAD-binding si domain identified by eMATRIX, accession number BL00065B, p-value= 3.520e-18, raw score of 16.97
  DOMAIN (212)..(350): D-isomer specific 2-hydroxyacid dehyd domain identified by PFam, accession name 2-Hacid_DH, E-value=1.3e-95, PFam score of 234.2
SGRVSVASDTRTTRRKMINVQNVSKTFILHQQNGVRLPVLNRASLTVNAGECVVLHGHSGSGKSTLLRSLYANYLPDEGQIQIKHGDEWVDLVTAPARKVVEIRKTTVGWVSQFLRVIPRISALEVVMQPLLDTGVPREACAAKAARLLTRLNVPERLWHLAPSTFSGGEQQRVNIARGFIVEYPILLLDEPTSSLDAKNRETACHINDLQTVADTLMALVLSTARRVVEVAERVKAGEWTASIGPDWYGTDVHHKTLGIVGMGRIGMALAQRAHFGFNMPILYNARRHHKEAEERFNARYCDLDTLLQESDFVCLILPLTDETHHLFGAEQFAKMKSSAIFINAGRGPVG

SEQ ID NO: 59304 - protein, 259 aa, Homo sapiens
  DOMAIN (10)..(25): ATP-citrate lyase / succinyl-CoA ligases family proteins domain identified by eMATRIX, accession number BL01216A, p-value= 1.000e-13, raw score of 13.91
  DOMAIN (1)..(173): ATP-grasp domain identified by PFam, accession name ATP- grasp, E-value=1.2e-20, PFam score of 82.1
SKIGAGPWVVKCQVHAGGRGKAGGVKVVNSKEDIRAFAENWLGKRLVTYQTDANGQPVNQILVEAATDIAKELYLGAVVDRSSRRVVFMASTEGGVEIEKLHAHCCSPLSFSFYSWSLYRWRTRVRVVLCFVVPEDKCHCASFPAPLRPHVVWFGEMPLGMDEIYMALSMADIFIAIGTSGHVYPAAGFVHEAKLHGAHTVELNLEPSQVGNEFAEKYYGPASQVVPCGVSARCWYVVTPSGLRPSYAVEPGRTGLRDN

SEQ ID NO: 59305 - protein, 79 aa, Homo sapiens
VVCMMPLSFLMRAGITCTTLGERSRRTSGGETGRIVNRTNGPLNEQLHSAMTPVISRRIRQISVRVRVGVRRMQAIQAG

SEQ ID NO: 59306 - protein, 64 aa, Homo sapiens
  misc_feature (1)...(64): Xaa = X or * as defined in Table 2
EIRATIVRSSTEGGRNSGLQSGNFCXRHGSXKITAGYIVPLPEESATATGASWTHPWGRQDASW

SEQ ID NO: 59307 - protein, 246 aa, Homo sapiens
  DOMAIN (101)..(128): Putative esterase domain identified by eMATRIX, accession number PF00756B, p-value=7.750e-26, raw score of 16.64
  DOMAIN (70)..(245): Putative esterase domain identified by PFam, accession name Esterase, E-value=4.5e-59, PFam score of 209.7
  misc_feature (1)...(246): Xaa = X or * as defined in Table 2
LMELIEKHVSFGGWQNMYRHYSQSLKCEMNVGVYLPPKAANEKLPVLYWLSGLTCNEQNFITKSGMQRYAAEHNIIVVAPDTSPRGSHVADADRYDLGQGAGFYLNATQAPWNEHYKMYDYIRNELPDLVMHHFPATAKKSISGHSMGGLGALVLALRNPDEYVSVSAFSPIVSPSQVPWGQQAFAAYLAENKDAWLDYDPVSLISQGQLRCGNHGXSGVEXXFLRRQLRLQIXKDWPQXEAAHVH

SEQ ID NO: 59308 - protein, 267 aa, Homo sapiens
  DOMAIN (179)..(209): ATP-citrate lyase / succinyl-CoA ligases family proteins domain identified by eMATRIX, accession number BL01216D, p-value= 3.842e-28, raw score of 21.75
  DOMAIN (171)..(228): CoA-ligases domain identified by PFam, accession name ligase- CoA, E-value=7e-33, PFam score of 121.8
LGKRLVTYHTDANGQPVNQILVEAATDIAKELYLGAVVDRSSRRVVFMASTEGGVEIEKVAEETPHLIHKVALDPLTGPMPYQGRELAFKLGLEGKLVQQFTKIFMGLATIFLERDLALIEINPLVITKQGDLICLDGKLGADGNELFRSLILREMRDQSQEDPREAQAAQWELNYVALDGNIGCMVNGAGLAMGTMDIVKLHGGEPANFLDVGGGATKERVTEAFNPPGYIGPYQGVPPAGPGVTRMGKSVRRIVQVGCQVAAGSH

SEQ ID NO: 59309 - protein, 454 aa, Homo sapiens
  DOMAIN (331)..(361): ATP-citrate lyase / succinyl-CoA ligases family proteins domain identified by eMATRIX, accession number BL01216D, p-value= 5.286e-27, raw score of 21.75
  DOMAIN (18)..(379): CoA-ligases domain identified by PFam, accession name ligase- CoA, E-value=1.5e-105, PFam score of 364.1
CANVEQIVQRSRLRSCADGNIGCMVNGAGLAMGTMDIVKLHGGEPANFLDVGGGATKERVTEAFKIILSDDKVKAVLVNIFGGIVRCDLIADGIIGAVAEVGVNVPVVVRLEGNNAELGAKKLADSGLNIIAAKGLTDAAQQGFTGSQGTFHSEQAIAYGTKMVGGVTPGKGGTTHLGLPVFNTVREAVAATGATASVIYVPAPFCKDSILEAIDAGIKLIITITEGIPTLDMLTVKVKLDEAGVRMIGPNCPGVITPGECKIGIQPGHIHKPGKVGIVSRSGTLTYEAVKQTTDYGFDPQTEAIVMIGEIGGSAEEEAAAYIKEHVTKPVVGYIAGVTAPKGKRMGHAGAIIAGGKGTADEKVRCFVGKGAPRAHGGKQDVFHGNALKVHPRLAEIGKCDFPSVGSDAGEQERRHFWRFPLDPCFKSSWRDNNTFLLTTFCDGLLFNDISPAY

SEQ ID NO: 59310 - protein, 512 aa, Homo sapiens
  DOMAIN (54)..(84): Putative esterase domain identified by eMATRIX, accession number PF00756D, p-value=8.364e-26, raw score of 16.93
  DOMAIN (269)..(381): CoA-ligases domain identified by PFam, accession name ligase- CoA, E-value=9.3e-58, PFam score of 205.3
LYPQRAAGISVHASFSGNGHTSLSLVILMGGLGALVLALRNPDEYVSVSAFSPIVSPSQVPWGQQAFAAYLAENKDAWLDYDPVHAGGRGKAGGVKVVNSKEDIRAFAENWLGKRLVTYQTDANGQPVNQILVEAATDIAKELYLGAVVDRSSRRVVFMASTEGGVEIEKVAEETPHLIHKVALDPLTGPMPYQGRELAFKLGLEGKLVQQFTKIFMGLAPIFLERDLALIEINPLVITKQGDLICLDGKLGADGNALFRQPDLREMRLAMGTMDIVKLHGGEPANFLDVGGGATKERVTEAFKIILSDDKVKAVLVNIFGGIVRCDLIADGIIGAVAEVGVNVPVVVRLEGNNAELGAKKLADSGLNIIAAKGLTDAAQQGFTGSQGTFHSEQAIAYGTKMVGGVTPDCYIEVKSVTLAENEQGYFPDAVTERGQKHLRELMSVAAEGQRAVIFFAVLHSAITRFSPARHIDEKYAQLLSEAQQRGVEILAYKAEISAEGMALKKSLPVTL

SEQ ID NO: 59311 - protein, 713 aa, Homo sapiens
  DOMAIN (557)..(606): Phosphomannose isomerase type I proteins domain identified by eMATRIX, accession number BL00965C, p-value=1.000e-40, raw score of 23.78
  DOMAIN (327)..(679): Phosphomannose isomerase type I domain identified by PFam, accession name PMI_typeI, E-value=1.2e-33, PFam score of 125.2
MYETLEEVLRSSGDPADQKYVELKARAEKALDDVKKRKLYCWRRRQICALRRISRSPYPGHQLECIASFDRNFEAMQKEMYGQFENTFMMYLPRLCEHCLNPSCVATCPSGAIYKREEDGIVLIDQDKCRGWRLCISGCPYKKIYFNWKSGKSEKCIFCYPRIESGQPTVCSETCVGRIRYLGVLLYELTAQQFFPVWPPDHFVHPFAVNQLNKEKLDRWLKDGITTPGGKLPSERELGELLGIKRMTLRQALLNLEAESKIFRKDRKGWFVTQPRFNYSPELSASFQRAAIEQGREPSWGFTEKNRTSDIPETLAPLIAVTPSTELYRITGWGALEGHKEFKMDKKQVTDLRSELLDSRFGAKSISTIAESKRFPLHEMRDDVAFQIINDELYLDGNARQNLATFCQTWDDENVHKLMDLSINKNWIDKEEYPLSAAIDLRCHHGCTGDGIRKRLSSLKPKFVSVTYGANSGERDRTHSIIKGIKDRTGLEAAPHLTCIDATPDELRTIAMNLPAKGGSMIMLAKGNRSQQGEPWQTIRLISEFYPEDSGLFSPLLLNVVKLNPGEAMFLFAETPHAYLQGVALEVMANSDNVLRAGLTPKYIDIPELVANVKFEAKPANQLLTQPVKQGAELDFPIPVDDFAFSLHDLSDKETTISQQSAAILFCVEGDATLWKGSQQLQLKPGESAFIAANESPVTVKGHGRLARVYNKL

SEQ ID NO: 59312 - protein, 28 aa, Homo sapiens
  misc_feature (1)...(28): Xaa = X or * as defined in Table 2
AASGSADDNLHHQYNXGDIAFCLHALLP

SEQ ID NO: 59313 - protein, 871 aa, Homo sapiens
MSKVGPSGTEINEFPGNVGSYRCVDMRHQGFPVLQQCGQQDFIHRIAATRQAALHGREHRRTPRGVTTIGKMHGGILVENSRQLADFRCANTTNLCCPFGGFRYSVTLAQQIRGEDGHNLWCNAPETLRRANHFPPAYGRSPASAQHRCPCAVPPTPFYRQRNRRFPIALDQCRSAFSRCHAVQKSKKAPAHRMHSTQFSACPVYSCKICFDSPVSMIIINDDSAARSKLGPPVSVVGFIQQQVAHWHPLRKILLHVDHRAVWLTDPARLTHRRRCHVYRVRRFGILRSCISSCRQSSRLRSSVVMDFFMSGNGASRRDEHNQQQAHYATGNQNPDQHIPCADTNHRCQPNPHDEPQTCAIPKVELVRPRVMKTALTPDSSPHQNLPRNDGFTKHIGINSSQVTFHRNIGNAIGINQQACPAHILGTVKCAAVGSGMSYVDWCCKCQVVWVAFRSPRTIFKPVVTKPLPPFSYPPFLAWSFPTPLYPDSAVLSAGFSYVNDFSLPVRRPPSYTHTAGLNAVTLPPSNQQLAEARTPRRACRAKKLSTCRPPPPTPTNMYTAQRRGTLFIWGFYKISHLSQFYFRDLVTPLRFGRRLMDMWGHIRRAPVTTFPELDPGCHTKIIRMGVIRRSMGTITGHTTGIRRTFVRLYSRATGAIGAPRGAAPSWGGGAALVAPVSLLGGCFMVVTHILPGGCSSYHYCWQWKKAVTVVSLPAVRFFLSLLTVMKNRCYRCESGDMRAGTASPPEKPRRSEDSQQPPNTPQLRGQRKHHSPTNTQEEVDDGYSAATQPPNHLTTLDNTPHRRAHTTPSACRCGRHEPPHTHRHRQATTAQGQNSHAERANDRSVHQIALAKTVPHLEYTAAARACPRAP

SEQ ID NO: 59314 - protein, 507 aa, Homo sapiens
  DOMAIN (191)..(246): Sigma-54 interaction domain proteins ATP-binding region A proteins domain identified by eMATRIX, accession number BL00675B, p -value=8.971e-33, raw score of 24.07
  DOMAIN (101)..(341): Sigma-54 transcription factors domain identified by PFam, accession name sigma54, E-value=4.2e-101, PFam score of 349.3
MVFLSTDANWRCASRTISSLEDYLIHITTGTHVAQICWFLLAEARYLPARLIQSSPPRKKEQPRGPGEVTIIDLDLSRYNAIASRFAEERQQTLDFLKSGIATRNPHFNRMIEQIEKVAIKSRAPILLNGPTGAGKSFLARRILELKQARHQFSGAFVEVNCATLRGDTAMSTLFGHVKGAFTGARESREGLLRSANGGMLFLDEIGELGADEQAMLLKAIEEKTFYPFGSDRQVSSDFQLIAGTVRDLRQLVAEGKFREDLYARINLWTFTLTGLRQRQEDIEPNLDYEVERHASLTGDSVRFNTEARRAWMAFATSPQATWRCNYRELSASVTRMATFATSGRITLDSVEDEINQPASLPDALGERIGNILDKTPDWYLYHRGHSHYYNYYAKHLDEHQIDIADSEVERLYRMMPVNTVREGFGDLMSRDVTGVLNTQAGVFHLVQEALVELKGKDRYFAHAHPRLQQHMHKTTEELGREITHQIFLLHLIAQTVKYACPPMAQA

SEQ ID NO: 59315 - protein, 261 aa, Homo sapiens
MPVIRLSLSGISRLKGGAEEETTALALLTPLFGDRLLPKKTLLLSTYFESVTPTLDTITALPVQGLHVDLVHGKDDVAELHKRLPSDWLLSAGLINGRNVWRADLTEKYAQIKDIVGKRDLWVASSCSLLHSPIDLSVETRLDAEVKSWFAFALQKCHELALLRDALNSGDTAALAERSAPDSSTSALYPGHKGTPNVSECCRTPIQKRNLVLITRIGGGDLTCGSLFLWILPLRGISTIVVLLVAHKEKSNNANHLRPCL

SEQ ID NO: 59316 - protein, 39 aa, Homo sapiens
SQAERYPHVLPPPSRSIQRSPPAPVFARHGSGDWYPDDE

SEQ ID NO: 59317 - protein, 97 aa, Homo sapiens
  misc_feature (1)...(97): Xaa = X or * as defined in Table 2
MWWGGLLYWLAALVTLLWAASQIQALKKLTCAISQTLEEQPVLNSKSWLTSLQNDYSLPDSLTERIWLTLISQRISRGELREFXTGRRKLVTEQCLV

SEQ ID NO: 59318 - protein, 175 aa, Homo sapiens
  DOMAIN (36)..(55): TYPE III EGF-LIKE SIGNATURE domain identified by eMATRIX, accession number PR00011B, p-value=1.610e-13, raw score of 13.08
  DOMAIN (24)..(67): Laminin EGF-like (Domains III and V) domain identified by PFam, accession name laminin_EGF, E-value=2.6e-11, PFam score of 51.0
LRCDHCNFGFKFLRSFNDVGCEPCQCNLHGSVNKFCNPHSGQCECKKEAKGLQCDTCRENFYGLDVTNLFLFRDKERSSTIPDPAYDFPGHDVLLSARRRHRYEAHPRDGMIQNGDLLKRDTSHRRPANDRENRHSLPVINSGGSGRAFSVHQLSTVLHDELRVVVQISETKIVR

SEQ ID NO: 59319 - protein, 437 aa, Homo sapiens
  DOMAIN (127)..(178): Site-specific recombinases proteins domain identified by eMATRIX, accession number BL00397B, p-value=5.909e-20, raw score of 27.48
  DOMAIN (199)..(369): Transposase domain identified by PFam, accession name Transposase_7, E-value=9.7e-107, PFam score of 368.0
  misc_feature (1)...(437): Xaa = X or * as defined in Table 2
MVDSLIARVGVMARGNAITLPVCGRDVKFTLEVLRGDSVEKTSRVWSGNERDQELLTEDALDDLIPSFLLTGQQTPAFGRRVSGVIEIGDGSRRRKAAALTESDYRVLVGELDDEQMAALSRLGNDYRPTSAYERESRSEGLDLLRMKVEEGDVILVKKLDRLGRDTADMIQLIKEFDAQGVSIRFIDDGISTDGEMVLDKLARGYADLSKAESQWDEMMRTAGSLKLGTIHASELIRSLLKSSRPSGLAQAIMEVGRVNKTLYLLNYIDDEDYRRRILTQLNRGEGRHAVARAICYGQRGEIRKRYREGQEDQLGALGLVTNAVVLWNTLYMEEALSWMRRNGEEIIDEDIARLSPLMHGHINMLGHYTFTLPEDILKGELRXRHLPPPSSSASPALPIGIHVHKHLLGDNRYPIWIMQPSAHHPARQPEHDNHFR

SEQ ID NO: 59320 - protein, 126 aa, Homo sapiens
  misc_feature (1)...(126): Xaa = X or * as defined in Table 2
NQTLMIKGAAHGIFNPLCIKATAGAGAYHGARKRLCANAALANXRNAGISVSCATTAPLSLALFTGAGQIAASNTGELDVLQQLGFSPIPRLILPGRSSARNRSARPRIGSAGAAVMFSNNELMDA

SEQ ID NO: 59321 - protein, 1368 aa, Homo sapiens; identical to SEQ ID NO: 56530
  DOMAIN (145)..(171): FAD-dependent glycerol-3-phosphate dehydrogenase proteins domain identified by eMATRIX, accession number BL00977B, p-value= 7.429e-20, raw score of 19.73
  DOMAIN (704)..(883): Aldo/keto reductase family domain identified by PFam, accession name aldo_ket_red, E-value=1.2e-100, PFam score of 347.8

SEQ ID NO: 59322 - protein, 275 aa, Homo sapiens
  DOMAIN (140)..(187): Phosphoglycerate kinase proteins domain identified by eMATRIX, accession number BL00111F, p-value=9.156e-16, raw score of 14.32
  DOMAIN (133)..(173): Phosphoglycerate kinases domain identified by PFam, accession name PGK, E-value=2.5e-13, PFam score of 50.0
PTAWSPPRPTSMTSISWVICCMERSNLSQPMPATKGRQARGAGEVDVDWLIAERPGKVRTLKQHPRKNKTGINIEYMKASIRAQVEHPFRIIKRQFGFVKARFKGLLKNDNQMGDVFHAGQPVSGGPNDTIGKFADVACAGPLLAAELDALGKALKEPARPMVAIVGGSKIVGALILLIAGFAILRLLFRALISTASALAGLILLCLFGPALLAGYITERITRLFHIRCAGSAYFIKNIQQNGITPEDISKRNGRVFLLVFILPFSLRRVGHAHH

SEQ ID NO: 59323 - protein, 100 aa, Homo sapiens
SDPQTATSQKAGACAVQQRHLYHVRGQHADPVPGARRKRVCMRPATPVVVPVPARVHQSVPTRCRVSPVLPALADKPAECRSAGSGGQIVHLSLSPATAR

SEQ ID NO: 59324 - protein, 558 aa, Homo sapiens
  DOMAIN (212)..(260): ELEMENT TRANSPOSASE FOR TRANSPOSON TRANSPOSABLE domain identified by eMATRIX, accession number PD02712D, p-value=9.325e- 36, raw score of 16.73
  DOMAIN (190)..(363): Transposase domain identified by PFam, accession name Transposase_7, E-value=1.1e-105, PFam score of 364.5
MAPYREHDGICEIHVAKYAEIFGLTSAEASKDIRQALKSFAGKEVVFYRPEEDAGDEKGYESFPWFIKRAHSPSRGLYSVHINPYLIPFFIGLQNRFTQFRLSETKEITNPYAMRLYESLCQYRKPDGSGIVSLKIDWIIERYQLPQSYQRMPDFRRRFLQVCVNEINSRTPMRLSYIEKKKGRQTTHIYSGFHGIVVPGTLRDSIFVLEGLLEQQTGLNPVEIMTDTAGSSDIIFGLFWLLGYQFSPRLADAGEAVFWRVNKSANYGVLDKLARGYADLSKAESQWDEMMRTAGSLKLGTIHASELIRSLLKSSRPSGLAQAIMEVGRVNKTLYLLNYIDDEDYRRRILTQLNRGEGRHAVAHTQATEYQKEITLTFLTSEGQKFAVEHLVNTRFGEQQYCASMTLGVEIDTSAAQKAIDELDQRIRDTVSFELIRNGVSFIKDAAIANGAIHAAAIETPQPVTNIYNISLGIQRDEPAQNKVTVSADKFKVKPGVDTNIETLIENALKNAAECAALDVTKQMAADKKAMDELASYVRTAIMMECFPGGVIWQQCRR

SEQ ID NO: 59325 - protein, 787 aa, Homo sapiens
  DOMAIN (27)..(69): ELEMENT TRANSPOSASE FOR TRANSPOSON TRANSPOSABLE domain identified by eMATRIX, accession number PD02712C, p-value=1.000e- 27, raw score of 20.92
  DOMAIN (1)..(787): Transposase domain identified by PFam, accession name Transposase_7, E-value=0, PFam score of 1512.7
  misc_feature (1)...(787): Xaa = X or * as defined in Table 2
MAEACNIGLEPLIKHNIPALTRHRLSWVKQNYLRAETLVSANARLVDFQSTLELAGRWGGGEVASADGMRFVTPVKTINSGSNRKYFGSGRGITWYNFVSDQYSGFHGIVVPGTLRDSNFVLEGLLEQQTGLNPVEIMTDTCGCLEKQEEPPSLLRLNNRIKQLLPPVDLTELLLEIDAQTGFTHEFAHVSESGARAQDLHISLCAVLMAEACNIGLEPLIKHNIPALTRHRLSWVKQNYLRAETLVSANARLVDFQSTLELAGRWGGGEVASADGMRFVTPVKTINSGSNRKYFGSGRGITWYNFVSDQYSGFHGIVVPGTLRDSNFVLEGLLEQQTGLNPDXNHDRHLRLSGETGRATIIASSKXSDQTATPTGRFNGTVTEIDAQTGFTHEFAHVSESGARAQDLHISLLRYXWLKPVISALEPLIKHNIPALTRHRLSWVKQNYLRAETLVSANARLVDFQSTLELAGRWGGGEVASADGMRFVTPVKTINSGSNRKYFGSGRGITWYNFVSDQYSGFHGIVVPGTLRDSNFVLEGLLEQQTGLNPVEIMTDTCGCLEKQEEPPSLLRLNNRIKQLLPPVDLTELLLEIDAQTGFTHEFAHVSESGARAQDLHISLCAVLMAEACNIGLEPLIKHNIPALTRHRLSWVKQNYLRAETLVSANARLVDFQSTLELAGRWGGGEVASADGMRFVTPVKTINSGSNRKYFGSGRGITWYNFVSDQYSGFHGIVVPGTLRDSIFVLEGLLEQQTGLNPVEIMTDTAEPNDVQLARYFHLDERDLAYH

SEQ ID NO: 59326 - protein, 969 aa, Homo sapiens
  DOMAIN (200)..(213): METHIONINE AMINOPEPTIDASE-1 SIGNATURE domain identified by eMATRIX, accession number PR00599D, p-value=7.525e-12, raw score of 12.92
  DOMAIN (39)..(180): Transposase domain identified by PFam, accession name Transposase_7, E-value=7.7e-61, PFam score of 215.5
MRATGILSTASQPPGKLPCMEESTAERRVGLPPLAKWSLLEQQTGLNPVEIMTDTAGHTILFSVCSGYWGEAVFWRVNKSANYGVLDKLARGYADLSKAESQWDEMMRTAGSCKLGTIHASELIRSLLKSSRPSGLAQAIMEVGRVNKTLYLLNYIDDEDYRRRILTQLNRGEGRHAVRRRHWLGLDVHDVGVYGQDRCVILEPGMVLTVEPGLYIAPDAEVPEQYRGIGIRIEDDIVITETGNENLTASVVKKPEEIEALMQLARIGVWQSLADCATAITTVHVSDRGHAGFVTLAAEDYQLAALGQVVELHNVGQRLFALLRKAPGVTLHCPDRVANVARTQSHVEVTLESGETLTGRVLNSQPQTDGAHLVTLISQRISRGELREFELADGNWLLNNAWYERNMAGFNEQLKENLSFTPDELKTLFRNRLNLSPEANDDFLDRCLDGGDCASRQVPVHGIFVWRSKPAFHFCIKTRFHAQVDGAVQQRAGRCHPQITFADNVLNLRIFLGKIGAPDVTTIDQTRRQQPVRRQALVQFSNVIFSMYEVNMQTLNRQRFQYQRGFINLYPLDAAFRQFCQHLLINRQNVVQQAQAVKLFTFHFPQPQPGNRPQQHRFHLVAHGQRLVHFVQQLRPGQFELLAFNELRHHVVIVGVKPFGHFRAAAGCQSAHVHDQYGTGCRYLPNHLCSDDAPERYPAADWWSVHDRTRQNRHRQQANGGMLFLDEIGELGADEQAMLLKAIEEKTFYPFGSDRQVSSDFQLIAGTARDLRQLDSEGKFREDLYARINLWTYTLPGLRQRQEDIEPNLDYEVERHASLTGDSVRFNTEARRAWLAFATSPQATWRGNFRELSASVTRMATFATSGRITLDVVEDEINRLRYNWQESRPSALTALLGAEAENIDLFDRMQLEHVIAICRQAKSLSAAGRQLFDVSRQGKASVNDADRLRKYLARFGLTWEAVQDQHSFS

SEQ ID NO: 59327 - protein, 65 aa, Homo sapiens
KRWFHRQRGQGDVWRRCKRWRDKRGDPHRSRPCMAWQDGIPDILVVDNRTKVCEPGGSEYRRLYG

SEQ ID NO: 59328 - protein, 470 aa, Homo sapiens
  DOMAIN (2)..(181): Cobalbumin biosynthesis enzyme domain identified by PFam, accession name COBU, E-value=1.2e-108, PFam score of 374.4
MILVTGGARSGKSRHAEALIGDSSQVLYIATSQILDDEMAARIEHHRQGRPEHWRTVERWQHLDELIHADINPNEVVLLECVTTMVTNLLFDYGGDKDPDEWDYQAMEQAINAEIQSLIAACQRCPAKVVLVTNEVGMGIVPESRLARHFRDIAGRAELRCVANAVDIESFFSAATAEDKQQVEQAINSSVNLVPFGLSASNWKVHRGDLVVEDGPNPMGGFPGVALLTEEYINFMASNFDRLTVWQDGKKVDFTLEAYSIPGALVQKLTAKDVQVEMTLRFATPRTSLLETKITSNKPLDLVWDGELLEKLEAKEGKPLSDKTIAGEYPDYQRKISATRDGLKVTFGKVRATWDLLTSGESEYQVHKSLPVQTEINGNRFTSKAHINGSTTLYTTYSHLLTAQEVSKEQMQIRDILARPAFYLTASQQRWEEYLKKGLTNPNGEARCKCHQGGGACLLTRENQRPLRCL

SEQ ID NO: 59329 - protein, 489 aa, Homo sapiens
  DOMAIN (19)..(177): Glycosyl transferases domain identified by PFam, accession name Glycos_transf_2, E-value=7.3e-16, PFam score of 66.1
MPIHLARTLTLREIIEPLRICDANKNHKKQRSSTAGAHSRTLTHSSQTQRGTELEVFTKYYAENYPHVRLLHQANAGASVARNRGIEVATGKYVAFVDADDEVYPTMYETLMTMALEDDLDVAQCNADWCFRETGETWQSIPTDRLRSTGVLTGPDWLRMGLSSRRWTHVVWMGVYRRDVIVKNNIKFIAGLHHQDIVWTTEFMFNALRARYTEQSLYKYYLHNTSVSRLHRQGNKNLNYQRHYIKITRLLEKLNRNYADKIMIYPEFHQQITYEALRVCHAVSHGSYAENEGEGKGEVQHENRSKLKLFKLKWVLKPEALSPRFPKQHPRSFTEALEVHKDPGGNAEKRPVEVRDHRVNGDGVSRLYAANQRLTCALLISFSAHAATADNYKNVINRTGAPQYMKDYDYDDHQRFNPFFDLGAWHGHLLPDGPNTMGGFPGVSASSTEEYINFMAQQFRPPDRLAGRQEMSTYTLGGIQYSRCAGCKN

SEQ ID NO: 59330 - protein, 61 aa, Homo sapiens
TQNHDVVCPFTASSARRIRATGRSPRVSEESPGNSTYIFCLHTMPEKTCLGVIHLFTEIFL

SEQ ID NO: 59331 - protein, 283 aa, Homo sapiens
  DOMAIN (43)..(73): kw TRANSCRIPTASE REVERSE II ORF2 domain identified by eMATRIX, accession number DM01354R, p-value=8.125e-19, raw score of 8.50
MPASGNENDLNMPSGTIEIFVRCYVEVERIIIKAKNHVIISIDAETAFTKIQYSFMIKSLDKLGKEGKYLNTIKAICGKPTEVTTQNTKTFLDSRIGKQKAREANVFKAMLFSTIYQNIQCKGQPKENKNPFSGKKFKLAAKICISTKQPNVHPQDYGENISRPCQKASRPFLTPQAQRPRRKKWFHGPGPGSLCCVQPRDLVLCVPATPGVAEKANVQLKLWLQRVEAPSLGSVHVVLSLKVHRSQELRFGNLCLDFRRYMETLGCTGKSLLQGQGPHENLF

SEQ ID NO: 59332 - protein, 188 aa, Homo sapiens
  DOMAIN (139)..(178): PROTEIN FERREDOXIN LIKE ELECTRON domain identified by eMATRIX, accession number PD02245B, p-value=4.649e-34, raw score of 21.71
MDLPIAAGEPAAKSVLPAMKSDDFSKQNLANIVSILRVVRCAICVCTRNYRRSLITHACLAATRSWRWRAGTDAQENPPPRQESGLHQSNQGWHERSDRFMTSPVNVDVKLGVNKFNVDEEHPHIVVKADADKQALELLVKACPAGLYKKQDDGSVRFDYAGCLECGTCRILGLGSALEQWEYPRGTS

SEQ ID NO: 59333 - protein, 531 aa, Homo sapiens
  DOMAIN (460)..(474): UvrD/REP helicase domain identified by eMATRIX, accession number PF00580D, p-value=5.500e-17, raw score of 13.15
  DOMAIN (399)..(523): UvrD/REP helicase domain identified by PFam, accession name UvrD-helicase, E-value=1.8e-64, PFam score of 227.6
MPMQPQIGGSYCYVRSPVNHIYLLLGELNTVAELAIVTNAPENMQRRGAMYLQRELKDKVAMMNRLQQALEHNHFSLMAQPITGMRGDVYHEILLRMKGENDELISPDSFLPVAHEFGLSSSIDMWVIDIRCNLWLKTERRCPLTVLLLICLQPSCTSKHSRSGDFLDSLRQAAAVQRSYWIESKADKEKVGDYVFGLKAQGRYNGEPLTGTGKIGGYLALRGEGTPFPVQADFRSGNTRVAFDGVVNDPMKMGGVDLRLKFSGDSLGDLYELTGVLLPDTPPFETDGRLVAKIDTEKSSVFDYRGFNGRIGDSDIHGSLVYTTGKPRPKLEGDVESRQLRLADLGPSSGVDSGKGAEKSKRSEQKKTCRQHERNTVPGGSKCDCERDRIFPIVMGSCNVLDFDDLILLPTLLLQRNEEVRKRWQNKIRYLLVDEYQDTNTSQYELVKLLVGSRARFTVVGDDDQSIYSWRGARPQNLVLLSQDFPALKVIKLEQNYRSSGRILKAANILIANNPHVFEKRLSPNWVMARS

SEQ ID NO: 59334 - protein, 157 aa, Homo sapiens
EGPNRQNGRDYRSVMPTNLLLRRFHEATAQNAPDVVVWGSGTPMREFLHVDDMAAASIHVMELAHEVWLENTQPMLSHINVGTGVDCTIRELAQTIAKVVGYKGRVVFDASKPDGTPRKLLDVTRLHQLGWYHEISLEAGLASTYQWFLENQDRFRG

SEQ ID NO: 59335 - protein, 193 aa, Homo sapiens
  DOMAIN (159)..(173): Aminotransferases class-III pyridoxal-phosphate attachment si domain identified by eMATRIX, accession number BL00600D, p-value= 1.000e-09, raw score of 8.71
  DOMAIN (139)..(189): Aminotransferases class-III pyridoxal-pho domain identified by PFam, accession name aminotran_3, E-value=1.2e-11, PFam score of 35.1
RLPCVLWITIPESKSFTFGFDLKNLGFPMVQQSRIVPAFVTQQMVFPDWKVSFLFTFTHPGHFKLVRRPDQIHILRFGTHFDDLTIGLFTLIFQRLDLRCVLGAARFRQSIGLRIEVILHRFGGWAAKIFRRLLAETGDIIHVPFNDLHAVKAVMDDHTCSVVVEPIHGEGGVTATNPYFLQGLRELCDHITH

SEQ ID NO: 59336 - protein, 988 aa, Homo sapiens
  DOMAIN (2)..(20): URIDINE KINASE SIGNATURE domain identified by eMATRIX, accession number PR00988A, p-value=1.571e-11, raw score of 6.39
  DOMAIN (263)..(427): Domain of unknown function DUF9 domain identified by PFam, accession name DUF9, E-value=7.2e-53, PFam score of 189.1
MRYIVALTGGIGSGKSTVANAFADLGINVIDADIIARQVVEPGAPALHAIADHFGANMIAADGTLQRRALRERIFANPEEKNWLNALLHPLISAETQHQIPAATSPYVLWGVPLLEKNHCSRFANPAASRFPGQVLTRQIRKLVQDHRQVDATGDLLAVGLAMLRQFDRFVSGRGTDANQYRHSPVDNGYSFFGECHALGCIHLAKFTTGTQIKQPVDPFINQEVGNFAHCLFIKGSVTMKRAGYRWNNAAEFFHYLSFLFELQLSSKLAVHDVLTNIYNRRYFFNSVESLLSRPVVKDFCVMLVDINQFKRINAQWGHRVGDKVLVSIVDIIQQSIRPDDILARLEGEVFGLLFTELNSAQAKIIAERMRKNVELLTGFSNRYDVPEQMTISIGTVFSTGDTRNISLVMTEADKALAKRKARGATKMLRHFIAASVIVLTSSFLIFELVASDRAMSAYLRYIVQKADSSFLYDKYQNVFAFAGRNSPRLFSTIKSRETSGVERLPWQSLPDVKTSLPPKAVLILKEPLQFARRAIRFAGIKNHPAFVTHHFGDGLRQLADSAVNARADVNVRQHRLGVLQPDFMRQLHDMNSRRRHIIDVQKFAHRVPLSRYASTSFSSETRLKPLGFGSTQICVEPMHFQLFVVAITTVSQTQLQASSFRQRFCVGMDLHGKFTRREVRSVQNMDLQHAACPKPVFSRLQVFPQEQAERYLEFLKGYLILIYAEFIGKEIQTAYLESYSEYGQNIFDRYVTYAAGGEGGATLINDKALIERAEIIREKGTNRSQFFRGQLHTCGRNWKQRIVSTSNVWRCGKTTTMRYACWQKRDVIELPSIPDGCVQNAHMFYIKLRDIDDRSALINFLKEAEIMAVFHYIPLHGVPCGGTTLVSSRLKIRYTTKSRAHGLLRLPLFYNLSPVNQPSLWTAASTLVKIGAGLLVGKLLAVSFGPAGLGLAANFRQLITVLGVLAGAGIFNGVTKYVAQYHDNSQQ

SEQ ID NO: 59337 - protein, 737 aa, Homo sapiens
  DOMAIN (438)..(477): PROTEIN FERREDOXIN LIKE ELECTRON domain identified by eMATRIX, accession number PD02245B, p-value=4.649e-34, raw score of 21.71
  DOMAIN (1)..(207): Electron transfer flavoprotein beta subunit domain identified by PFam, accession name ETF_beta, E-value=3e-08, PFam score of 4.0
MKIITCFKLVPEEQDIVVTPEYTLNFDNADAKISQFDLNAIEAASQLATDDDEIAALTVGGSLLQNSKVRKDVLSRGPHSLYLVQDAQLEHANLSCLQVQLIARPHFPDDRRAIHHRLRIDGGVMLGGKPVGNSREKLIVFPAAVAKYAVHQALIHMEIAKIACSWDCLSDLVNALRAKCGGGFPTGPRLAMAAKEHQRLLSIANTVPYFQLSVRDTGIDTYVLIVGESVRVDNMSLYGYTRSTTPQVEAQRKQIKLFNQAISGAPYTALSVPLSLTADSVLSHDIHNYPDNIINMANQAGFQTFWLSSQSAFRQNGTAVTSIAMRAMETVYVRGFDELLLPHLSQALQQNTQQKKLIVLHLNGSHEPACSAYPQSSAVFQPQDDQDACYDNSIHYTDSLLGQVNVDVKLGVNKFNVDEEHPHIVVKADADKQALELLVKACPAGLYKKQDDGSVRFDYAGCLECGTCRILGLGSALEQWEYPRGTFGITMQPSRNFDDLKFSSIHRRILLWGSGGPFLDGYVLVMIGVALEQLTPALKLDADWIGLLGAGTLAGLFVGTSLFGYISDKVGRRKMFLIDIIAIGVISVATMFVSSPVELLVMRVLIGIVIGADYPIAPHDHEFSVPSAGVFIQLMPRCVIVTSTKSDSLYTVGMLALSVRAIRCPLYLLTGLIFVSKNDLWYCELQSHYTVVLLLFMRKRSRFQSNVQRKLMTNFWPTLRAFYRVTPHRSFVSDAGF

SEQ ID NO: 59338 - protein, 156 aa, Homo sapiens
PSQQFFHWSHIICFDTFGLHKGMFCVIKVEHIYPRRDELLKLIFSERIHYAMSKFNVIFCRGDNLPNANQQCPFSISMIDSSWYLCGQRRSKRRRLKGSCKWPTAEVPSGTSCKPAPTLSPLSSSVLSQTAGWRCSSRSQSIPRTVRQQTYRRRTS

SEQ ID NO: 59339 - protein, 90 aa, Homo sapiens
SARGCPPAVSPAHTGWCWCPDTHPPADSEFCSASACGLLHCVAAATSAIKSDHRSRERYRLSGVHHTAHNNGQKYGPARQSHLLPPGTVF

SEQ ID NO: 59340 - protein, 597 aa, Homo sapiens
  DOMAIN (270)..(523): NAD dependent epimerase/dehydratase family domain identified by PFam, accession name Epimerase, E-value=0.0005, PFam score of - 139.3
CWFDTSAAITQFGEQTLFKDVRVIGDQDVPRFQNTPGRAIVLLKFNHLQRRKILTQQHQVLRTCTAPGVDRLVIVTHHAVSPAHTGWCWCPDTHPPADSEFCSASACGLLHCVAAATSAIKSDHRSRERYRLSGMDDPAIPFTTLSSRFTPSLRTHTTMNLTELKNTPVSELITLGENMGLENLARMRKQDIIFAILKQHAKSGEDIFGDGVLEILQDGFGFLRSADSSYLAGPDDIYVSPSQIRRFNLRTGDTISGKIRPPKEGERYFALLKVNEVNFDKPENARNKILFENLTPLHANSRLRMERGNGSTEDLTARVLDLASPIGRGESELLQGTLEPTNEPYAIAKIAGIKLCESYNRQYGRDYRSVMPTNLYGPHDNFHPSNSHVIPALLRRFHEATAQNAPDVVVWGSGTPMREFLHVDDMAAASIHVMELAHEVWLENTQPMLSHINVGTGVDCTIRELAQTIAKVVGYKGRVVFDASKPDGTPRKLLDVTRLHQLGWYHEISVEAERAITYQVRDLDAANVVINAVFSYVTNVWGWAFEWYMVVMLFGWFWLVFGPYAKKRLGNEPPECSSARWINMMGYRARVRLNGLH

SEQ ID NO: 59341 - protein, 162 aa, Homo sapiens
  DOMAIN (2)..(155): Transposase domain identified by PFam, accession name Transposase_15, E-value=3e-44, PFam score of 160.4
SLSLDSALPDRTTIMNFRHLLEQHQLARQLFKTINRWLAEAGVMMTQGTLVDATIIEAPSSTKNKEQQRDPEMHQTKKGNQWHFGMKAHIGVDAKSGLTHSLVTTAANEHDLNQLASTQEQNGINIEYMKASIRARVEHPFRIIKRQFGFVKARYKGLLKKR

SEQ ID NO: 59342 - protein, 361 aa, Homo sapiens
  DOMAIN (102)..(154): ELEMENT TRANSPOSABLE INSERTION PROTEIN TRANSPOSITION DNA domain identified by eMATRIX, accession number PD02455C, p-value= 3.308e-38, raw score of 29.23
  DOMAIN (56)..(359): Na+ dependent nucleoside transporter domain identified by PFam, accession name Nucleoside_tra2, E-value=7.9e-45, PFam score of 162.4
METFSLKAAIKVKRYRSYRGEVGQTAPNVLQRDFKATRPNEKWVTDVTEFAVNGRKLYLSPVIDLFNNEVISYSLSERPVMNMVENMLDQAFKKLNPHEHPVLHSDQGWQYRMRRYQNILKEHGIKQSMSRKGNCLDNAVVECFFGTLNIFQKALNISKIESFVAVTTIFLGQNEIPAIVKPFIDRMNRNELFTAICSGMASIAGSMMIGYAGMGVPIDYLLAASLMAIPGGILFARILSPATEPSQVTFENLSFSETPPKSFIEAAASGAMTGLKIAAGVATVVMAFVAIIALINGIIGGIGGWFGFANASLQSIFGYVLAPLAWIMGVDWSDANLAGSLIGQKLAINDMQASKISASPT

SEQ ID NO: 59343 - protein, 896 aa, Homo sapiens
  DOMAIN (238)..(268): 2Fe-2S ferredoxins iron-sulfur binding region proteins. domain identified by eMATRIX, accession number BL00197A, p-value= 8.342e-14, raw score of 18.23
  DOMAIN (218)..(335): 2Fe-2S iron-sulfur cluster binding domai domain identified by PFam, accession name fer2, E-value=0.00022, PFam score of 28.0
SWRSVQLLPATSIPSWQTETNQFMGRDRPTPTAESPYAVLLRQPLAKLNIIQRPVMNMVENMLDQAFKKLNPHEHPVLHSDQGWQYRMRRYQNILKEHGCGVTPIMSMRRWLAKNRPQADVRVIYNVRTPQDVIFADEWRNYPVTLVAENNVTEGFIAGRLTRELLAGVPDLASRTVMTCGPAPYMDWVEQEVKALGVTRFFKEKFFTPVAEAATSGLKFTKLQPAREFYAPVGTTLLEALESNNVPVVAACRAGVCGCCKTKVVSGEYTVSSTMTLTDAEIAEGYAVVALIKPGAQIGRSPVNCDVASCHVISFNLRVELAIMRRLLCRIAVLMSYRIEQRLMFLERLRHVGLIAHPAKKAIKKTRKPGMKVTFEQLKAAFNRVLISRGVDSETADACAEMFARTTESGVYSHGVNRFPRFIQQLENGDIIPDAQPKRITSLGAIEQWDAQRSIGNLTAKKMMDRAIELAADHGIGLLRLAGGGKRLYWHLLDQLHRRNDNISLDLGNNAEAVILREDMLPRENFRPGDRVRGVLYSVRPEARGAQLFVTRSKPEMLIELFRIEVPEIGEEVIEIKAAARDPGSRAKIAVKTNDKRIDPPTQHEDEEDEGLYDDPFPLNECSVGPGHRHRFAPPEAQFRRPETLKGAPTSRIPETSVGVSAGSDFEPHLMRELTCRLTALTWCYPGSAYAVHQPDEEPLDYHCRQNSRWRTYIATCHQVINLRCVDSLIFHESIFHRMQNIHIVGQKLTRTIIVTLNQCFHFLVDDTCSFIGHMFRFRYATAEEHFTFFFRVQQWTQFLREAPLSHHVTCQVGRNFNIVGRTGRYMFRPVDDLFCQTTTVQRRNLAFQFLTAGADCVALRQEESHTQRTTAWDNRHFVHRIVFRHQATDNRMTRF

SEQ ID NO: 59344 - protein, 270 aa, Homo sapiens
  DOMAIN (60)..(251): Transposase domain identified by PFam, accession name Transposase_15, E-value=7.7e-83, PFam score of 288.6
MSHQLTFADSEFSSKRRQTRKEIFLSRMEQILPWQNMVEVIEPFYPKAGNGRRPYPLETMLRIHCMQHWYNLSDGAMEDALYEIASMRLFARLSLDSALPDRTTIMNFRHLLEQHQLARQLFKTINRWLAEAGVMMTQGTLVDATIIEAPSSTKNKEQQRDPEMHQTKKGNQWHFGMKAHIGVDAKSGLTHSLVTTAANEHDLNQLVQNELETAERFRRQEDTQSKCLLSSIMLYIKNLSGPDVSELISPLSEGFNLCSSVVVAVIAAVL

SEQ ID NO: 59345 - protein, 610 aa, Homo sapiens
  DOMAIN (340)..(547): Transposase domain identified by PFam, accession name Transposase_15, E-value=4.7e-05, PFam score of -14.2
MLLRRLSSCKAGAVSAYLSSPLAPSEPVTLASAGVSPQGAGLVIQKNLSAAVATTLNGNSVFGGAGAASAPTGTPSGQPLAVAPGLGSSPLVPAPNVILHRTPTPIQPKPAGVLPPKLYQLTPKPFAPAGATLTIQGEPGALPQQPKAPQNLTFMAAGKAGQNVVLSGFPAPALQANVFKQPPATTTGAAPPQPPGALSKPMSVHLLNQGSSIVIPPSTCCRARTSSYCLAPRRSSSRSSSQPCRPTWAGRSWRPLPPTQVGQPALFQMPVSLAAGSLPTQSQQRPPGRPPPLSSRGRVSPSAEMVMIDRMFIQEEKTTLALDKQLAKEKPGERGDFVCAQFPIQVVESVSIIDTPGILLGARLRVNRVPPSVLRGSSCAVSVLSAVRGGAQGLRSGAAGGSWSTVPFIWPVGGGGGGGRGGGSATLRVFDGRTVAGGHGARPRRRPRRSAAEEEEEEEDREEDARAQLPIHCNHSLVTTAANEHDLNQLGNLLHGEEQFVSADAGYQGAPQREELTEVDVDWLIAERPGKVRTWKQHPRKNKTAINIEYMKASIRARVEHPFRIIKRQFGFVKARYKGLLKNDNQLAMLFTLANLFRADQMIRQWERSH

SEQ ID NO: 59346 - protein, 435 aa, Homo sapiens
  DOMAIN (347)..(399): ELEMENT TRANSPOSABLE INSERTION PROTEIN TRANSPOSITION DNA domain identified by eMATRIX, accession number PD02455C, p-value= 1.000e-40, raw score of 29.23
  DOMAIN (280)..(434): Integrase core domain identified by PFam, accession name rve, E-value=1.7e-41, PFam score of 147.5
MMPLIDLEDPRLLVRREIGMLLHVDYLDLVHEKVTCRGRNGGQDREKTTMEKVRSSGTICPQAPEVVNHYFTTDDGYRIISARFGVPRTQVRTWVALYEKHGEKGLIPKPKGVSADPELRIKVVKAVIEQHMSLNQAAAHFMLAGSGSVARWLKVYEERGEAGLRALKIGTKRNIAISVDPEKAASALELSKDRRIEDLERQVRFLETRLMYLKELKALAHPTKKVTLSLHREGKQINHKAVQRLMGTLSLKAAIKVKRYRSYRGEVGQTAPNVLQRDFKATRPNEKWVTDVTEFAVNGRKLYLSPVIDLFNNEVISYSLSERPVMNMVENMLDQAFKKLNPHEHPVLHSDQGWQYRMRRYQNILKEHGIKQSMSRKGNCLDNAVVECFFGTLKSECFYLDEFSNISELKDAVTEYIEYYNSRRISLKLKGLTPI

SEQ ID NO: 59347 - protein, 278 aa, Homo sapiens
  DOMAIN (60)..(249): Transposase domain identified by PFam, accession name Transposase_15, E-value=1.5e-85, PFam score of 297.7
MSHQLTFADSEFSSKRRQTRKEIFLSRMEQILPWQNMVEVIEPFYPKAGNGRRPYPLETMLRIHCMQHWYNLSDGAMEDALYEIASMRLFARLSLDSALPDRTTIMNFRHLLEQHQLARQLFKTINRWLAEAGVMMTQGTLVDATIIEAPSSTKNKEQQRDPEMHQTKKGNQWHFGMKAHIGVDAKSGLTHSLVTTAANEHDLNQLVEYWILLPAMILLMIESVASFAWFIRWFGRVVPGKPSEAVANAAPLPGSMRLVLIVLIVMSLISSVIAATWL

SEQ ID NO: 59348 - protein, 522 aa, Homo sapiens
  DOMAIN (423)..(475): ELEMENT TRANSPOSABLE INSERTION PROTEIN TRANSPOSITION DNA domain identified by eMATRIX, accession number PD02455C, p-value= 1.000e-40, raw score of 29.23
  DOMAIN (356)..(515): Integrase core domain identified by PFam, accession name rve, E-value=5.5e-47, PFam score of 166.5
MPNFWLAFLLVMAFSVYLQWLPAMGYGGWQHIILPAVSIAFMSLAINARLLRASMLDVAGQRHVTWARLRGLNDKQTERRHILRNASLPMITAVGMHIGELIGGTMIIENIFAWPGVGRYAVSAIFNRDYPVIQCFTLMMVVVFVVCNLIVDLLNAALDPRIRRHEGAHARLICRRACFRRMRSTALGTDHLVAHFGTQIDAYHVTVSLSWFLAKMYSVSGSVWFHSTLTESLSSSHEKVKVLNELRQFYPLDELLRAAEIPRSTFYYHLKALSKPDKYADVKKRISEIYHENRGRYGYRRVTLSLHREGKQINHKAVQRLMGTLSLKAAIKVKRYRSYRGEVGQTAPNVLQRDFKATRPNEKWVTDVTEFAVNGRKLYLSPVIDLFNNEVISYSLSERPVMNMVENMLDQAFKKLNPHEHPVLHSDQGWQYRMRRYQNILKEHGIKQSMSRKGNCLDNAVVECFFGTLKSECFYLDEFSNISELKDAVTEYIEYYNSRRISLKLKGLTPIEYRNQTYMPRV

SEQ ID NO: 59349 - protein, 212 aa, Homo sapiens
  misc_feature (1)...(212): Xaa = X or * as defined in Table 2
RTSSSLMRSSSSLLRICSGVSPRSIPRWFTSVSLPSSFIRRITTFRYTPGHVAPASRRSCYKYRRXPMRLYTMIQSLSVGSRPSGLRAFSSDCSPLPRTCSLSRRRVLMITTSRSXSLTYGVDPSVRPVLAAASEYFSRRYAGFQNPHNLLVSGXYQGNYRHFGILRGYPGTLKNSNFQLTRSARISLSSRSSICTSTGGNTTLPPSSPPDC

SEQ ID NO: 59350 - protein, 286 aa, Homo sapiens
  DOMAIN (238)..(268): 2Fe-2S ferredoxins iron-sulfur binding region proteins. domain identified by eMATRIX, accession number BL00197A, p-value= 8.342e-14, raw score of 18.23
  DOMAIN (58)..(100): Integrase core domain identified by PFam, accession name rve, E-value=0.00034, PFam score of 18.5
SWRSVQLLPATSIPSWQTETNQFMGRDRPTPTAESPYAVLLRQPLAKLNIIQRPVMNMVENMLDQAFKKLNPHEHPVLHSDQGWQYRMRRYQNILKEHGCGVTPIMSMRRWLAKNRPQADVRVIYNVRTPQDVIFADEWRNYPVTLVAENNVTEGFIAGRLTRELLAGVPDLASRTVMTCGPAPYMDWVEQEVKALGVTRFFKEKFFTPVAEAATSGLKFTKLQPAREFYAPVGTTLLEALESNNVPVVAACRAGVCGCCKTKVVSGEYTVSSTMTLTDAEIAEGY

SEQ ID NO: 59351 - protein, 57 aa, Homo sapiens
  misc_feature (1)...(57): Xaa = X or * as defined in Table 2
SPSHIRRTAPNGLRHYQRXIQQXAPSDQKRDFLVPHGADSAMAKHGGSHRAVLPQGW

SEQ ID NO: 59352 - protein, 199 aa, Homo sapiens
  DOMAIN (61)..(113): ELEMENT TRANSPOSABLE INSERTION PROTEIN TRANSPOSITION DNA domain identified by eMATRIX, accession number PD02455C, p-value= 7.000e-10, raw score of 29.23
GLEGAVVQDGPAVDARRLQLVLRQHIRAQGQDSLSERPVMNMVENMLDQAFKKLNPHEHPVLHSDQGWQYRMRRYQNILMGRDDLNLRGGAGAVLLQVELHEVERELWDLADGPVLAPACAWPWSAWPAMRALGAQEALGQQALGQAAAAALGQELGQVLEVENEHDDSPVLVLHGHHIILAVVEDVHLALLSPQQGLR

SEQ ID NO: 59353 - protein, 45 aa, Homo sapiens
HAHDIPAVHVRQHNIEDYQIIITGHRQMVAIQPVVGQIDHKTGFG

SEQ ID NO: 59354 - protein, 166 aa, Homo sapiens
  DOMAIN (15)..(61): RNA polymerase beta subunit domain identified by PFam, accession name RNA_pol_B, E-value=6.2e-36, PFam score of 130.6
RLVNAVYAQVFVNRLVTQQPLGGKAQFGGQRFGEMEVWALEAYGAAYTLQEMLTVKSDDVNGRTKILITWKFVRNNKTAINIEYMKASIRARVEHPFRIIKRQFGFVKARYKGLLKNDNQLAMLFTLANLFRADQMIQSKFSQESAAVLMRVMMLVKGLEEAGFSE

SEQ ID NO: 59355 - protein, 449 aa, Homo sapiens
  DOMAIN (350)..(402): ELEMENT TRANSPOSABLE INSERTION PROTEIN TRANSPOSITION DNA domain identified by eMATRIX, accession number PD02455C, p-value= 1.000e-40, raw score of 29.23
  DOMAIN (283)..(442): Integrase core domain identified by PFam, accession name rve, E-value=5.5e-47, PFam score of 166.5
MKAHGLSSGSCGLASLNKTSVYAGGGGGVAYLPDSGVDLRFPHGQQLWSELGFGLDWGLLMGEGDLFDGFADGLGVAEAISYVDPQFLTYMALEERLAQAMEVRTWVALYEKHGEKGLIPKPKGVSADPELRIKVVKAVIEQHMSLNQAAAHFMLAAESLSSSHEKVKVLNELRQFYPLDELLRAAEIPRSTFYYHLKALSKPDKYADVKKRISEIYHENRGRYGYRRVTLSLHREGKQINHKAVQRLMGTLSLKAAIKVKRYRSYRGEVGQTAPNVLQRDFKATRPNEKWVTDVTEFAVNGRKLYLSPVIDLFNNEVISYSLSERPVMNMVENMLDQAFKKLNPHEHPVLHSDQGWQYRMRRYQNILKEHGIKQSMSRKGNCLDNAVVECFFGTLKSECFYLDEFSNISELKDAVTEYIEYYNSRRISLKLKGLTPIEYRNQTYMPRV

SEQ ID NO: 59356 - protein, 819 aa, Homo sapiens
  DOMAIN (495)..(533): ELEMENT TRANSPOSABLE INSERTION PROTEIN TRANSPOSITION DNA domain identified by eMATRIX, accession number PD02455A, p-value= 2.091e-29, raw score of 25.65
  DOMAIN (599)..(683): EPSP synthase domain identified by PFam, accession name EPSP_syntase, E-value=3.2e-37, PFam score of 137.1
VIRLGAQQVVDIDAQFTCVDWVQRVFSIDKRTGFTFTLRCGDHLQRQRGFTGRFRSVDFDDTAHRQTTCPKRDIHASRRVMFLAMVSYIKRARSMRDIRNEKGTAKPDPAVMKRLIQLGLPIALALFFEVTLFAVVALLVSPLGIVDVAGHQIALNFSSLMFVLPMSLAAAVTIRVGYRLGQGSTLDAQTAARTGLMVGVCMATLTAIFTVSLREQIALLYNDNPEVVTLAAHLMLLAAVYQISDSIQVIGSGILRGYKDTRSIFYITFTAYWVLGLPSGYILALTDLVVEPMGQQASDSLLLPTTLHWIKMKTIEVDDELYSYIASHTKHIGESASDILRRMLKFSAASQPAAPVTKEVRVASPAIVEAKPVKTIKDKVRAMRVYEERGEAGLRALKIGTKRNIAISVDPEKAASALELSKDRRIEDLERQVRFLETRLMYLKKLKALAHPTKKAAEIPRSTFYYHLKALSKPDKYADVKKRISEIYHENRGRYGYRRVTLSLHREGKQINHKAVQRLMGTLSLKAAIKVKRYRSYRGEVGQTAPNVLQRDFKATRPNEKWVTDVTEFAVNGRKLYLSPVIDLFNNEVISYSLSERPNTVIRIKGDLVSKPYIDITLNLMKTFGVEIENQHYQQFVVKGGQSYQSPGTYLVEGDASSASYFLAAAAIKGGTVKVTGIGRNSMPGKQQLKTMKQATRKPTTPGDILLYEYLEPLDLKINELAELLHVHRNSVSALINNNRKLTTEMAFRLAKVFDTTVDFWLNLQAAVDLWEVENNMRTQEELGRIETVAEYLARREERAKRSRRIRRSRRIRHPSTIA

SEQ ID NO: 59357 - protein, 73 aa, Homo sapiens
  misc_feature (1)...(73): Xaa = X or * as defined in Table 2
IFCASLSLGLYAGIEARILTKGYTRKXIQQXAPSDQKRDFLVPHGADSAMAKHGGSHRAVLPQGCDPHMESLI

SEQ ID NO: 59358 - protein, 311 aa, Homo sapiens
  DOMAIN (163)..(222): Integrase core domain identified by PFam, accession name rve, E-value=0.0003, PFam score of 18.7
AGDAVEADLITLVLFRPRGAVVGAGHLHQGSCKALSILRGIPIPKCAGYHQHQRLVFEGHHVILIHTQDPGIKSLPEESPQLLCVALGPAGLGAIQDCRLHSLRHHRAHERGGDLHGAKGVSADPELRIKVVKAVIEQHMSLNQAAAHFMLAGSGSVARWLKVDVTEFAVNGRKLYLSPVIDLFNNEVISYSLSERPVMNMVENMLDQAFKKLNPHEHPVLHFGHFFKGLLPGDAGALGGTPLPGVWLVAEGRGQEIVDHLLMENRSEAARDGGHDPGPVCRAAPPGLLLILQVLHERGRGGVVVHDGDFG

SEQ ID NO: 59359 - protein, 529 aa, Homo sapiens
  DOMAIN (340)..(460): Orotidine 5'-phosphate decarboxylases domain identified by PFam, accession name OMPdecase, E-value=1.3e-38, PFam score of 136.5
  misc_feature (1)...(529): Xaa = X or * as defined in Table 2
MAGNRRFMCTPKTHGLSISQHGTFPEHAGCKIRCAGRSGRVRPAELLAPYTGDIAAEGISKAMRGGAKFLHHGIKRQQRYVAEAITEEWRMAPGPLEVAWFAGVIYHLYYYRARFFCAAQPLVSGFHEAELSLDDAKWVLHPGPDAGFHVFDVDGRFVLAWMLFQGSYLAGALGDQPVHIHLGQLLALWRPLQITQLIEVMLVGRGGDQAVGQATLGIDTNGGLYAKGPLIAFLGLMHLRIALLLFVLGRTGCAYDGGRPQLAEKLYSELRAQGIEVLLDDRKERPGVMFADMELIGIPHTIVLGDRNLDNDDIEYKYRRNGEKQLIKTGDIVEYLNAALLIAVTVLTSMEASDLVDLGMTLSPADYAERLAALTQKCGLDGVVCSAQEAVRFKQVFGQEFKLVTPGIRPQGSEAGDQRRIMTPEQALSAGVDYMVIGRPVTQSVDPAQTLKAINASLQRSAXCRDAGTLRLRAWLCXFLQRRYHRYKGPAVPQVELCQICQRNEFCTQRVPGMCHVVILITRAFSACT

SEQ ID NO: 59360 - protein, 75 aa, Homo sapiens
  misc_feature (1)...(75): Xaa = X or * as defined in Table 2
NAGDRRNRNPSCTAARQYGXSRFYNCRRXRHGRKNLSAERNGLPEYRNCNPDHRPSVFLAAGRCFAPTMCHDASE

SEQ ID NO: 59361 - protein, 531 aa, Homo sapiens
  DOMAIN (60)..(241): Transposase domain identified by PFam, accession name Transposase_15, E-value=8.9e-91, PFam score of 315.0
MSHQLSFADSEFSNKRRQTRKEIFLSRMEQILPWQNMVEVIEPFYPKAGNGRRPYPLGNMLRIHCMQHWYNLSDGAMEDALYEIASMRLFARLSLDSALPDRTTIMNFRHLLEQHQLARQLFKTINRWLAEAGVMMTQGTLVDATIIEAPSSTKNKEQQRDPEMHQTKKGNQWHFGMKAHIGVDAKSGLTHSLVTTAANEHDLNQLARGAGRGGCGLADPERPGKVRTLKQHPRKNKTAINIEYMKASIRARVEHPFRIIKRQFGFVKARYKGLLKNDNQLAMLFTLANLFRADQMIRKSRDNFRIGIRRVDLKSRPGCHGKFNSLVATKLLQGMGFQKVAWRPGYRRSAPIITQSVEVDLPDATESQAVSSNDNPPVIVEVSGIGQYTVVVEKDRLERLPPEQVVAEVSSRFKANPKTVFLIGGAKDVPYDEIIKALNLLHSAAVLHVILFAALIWSSFDENIEASAGGGGGSSIDAVMVDSGAVVEQYKRMQSQESSAKRFYERRFLRILHVADKWRCQRPPMSASLGA

SEQ ID NO: 59362 - protein, 1262 aa, Homo sapiens
  DOMAIN (589)..(607): ECOLI/NEISSERIA PORIN SUPERFAMILY SIGNATURE domain identified by eMATRIX, accession number PR00182E, p-value=1.000e-21, raw score of 16.34
  DOMAIN (683)..(886): Transposase domain identified by PFam, accession name Transposase_15, E-value=9.1e-121, PFam score of 414.6
  misc_feature (1)...(1262): Xaa = X or * as defined in Table 2
MKVTFEQLKAAFNRVLISRGVDSETADACAEMFARTTESGVYSHGVNRFPRFIQQLENGDIIPDAQPKRITSLGAIEQWDAQRSIGNLTAKKMMDRAIELAADHGIGLVALRNANHWMRGGSNGWQAAEKGYIGICWTNSIAVMPPWVPKECRIGTNPLIVAIRSTPITMVDMSMIKHTLPQRAAGTDRKLAMSREAQLLERHGYAFNELDLGKREPVTEEEKLFVAVCRGEREPVTEAERVWSKYMTRIKRPKRFHTLSGGKPQPGKKIVIRPLPGLPVIRDLVVDMGQFYAQYEKIKPYLLNNGQNPPAREHLQMPEQREKLDGLYECILCACCSTSCPSFWWNPDKFIGPAGLLAAYRFLIDSRDTETDSRLDGLSDAFSVFRCHSIMNCVSVCPKGLNPTRAIGHIKSMLLQHENAGVKILRRFGRELLLRNCRYSRNFFRLIFLITFQLRYLSHKLSCHIHRNGQFRIQRFNRTIYFLRQRLRRFFSRCRIFQEQRQIQGTFTLMFFHLXGLKYDANNIYLATTYSETQNMTVFADHFVANKAQNFEAVAQYQFDFGLRPSVAYLQSKGKDLGVWGDQDLVKYVDVGATYYFNKNMSTFVDYKINLLDKNDFTKEGFIMSHQLTFADSEFSSKRRQTRKEIFLSRMEQILPWQNMVEVIEPFYPKAGNGRRPYPLETMLRIHCMQHWYNLSDGAMEDALYEIASMRLFARLSLDSALPDRTTIMNFRHLLEQHQLARQLFKTINRWLAEAGVMMTQGTLVDATIIEAPSSTKNKEQQRDPEMHQTKKGNQWHFGMKAHIGVDAKSGLTHSLVTTAANEHDLNQLGNLLHGEKQFVSADAGYQGAPQREELAEVDVDWLIAERPGKVRTLKQHPRKNKTAINIEYMKASIRARVEHPFRIIKRQFGFVKARYKGLLKNDNQLAMLFKSKQPFGPGHGFAVTVIEHAEPAPFVADSQPDVRISAISAASVSLLKGLGVWDAVQAMRCHPYRRLETWEWETAHVVFDAAELKLPLLGYMVENTVLQQALWQALDSSLIALHRHDDLQELELKGGEVIRANVVIGADGQIRRCELPCLQVFCLVHDLPVLFVTLAALAHPILINRPIVVTPLGTRLCRPSEVVLEILPDAQKGAFSKEDGEKVVDEAAAGVDQNINQGIDITITKIHSLPRQRMDGMRGIAHQRKPWLHVLQRMATRQRKRTSGKRCNVTQTRREMLRDFRLELCHIHILQLANTRRRVIRGSSRVLGMVVCTYSPSYLEG

SEQ ID NO: 59363 - protein, 129 aa, Homo sapiens
  DOMAIN (34)..(68): ELEMENT TRANSPOSABLE INSERTION PROTEIN TRANSPOSITION DNA domain identified by eMATRIX, accession number PD02455B, p-value= 7.366e-21, raw score of 21.87
  DOMAIN (38)..(122): Integrase core domain identified by PFam, accession name rve, E-value=3e-17, PFam score of 63.7
RHADTRGRIQNIGDIPCDGANTMSIGHIPGSGVNHHHQATRPNEKWVTDVTEFAVNGRKLYLSPVIDLFNNEVISYSLSERPVMNMVENMLDQAFKKLNPHEHPVLHSDQGWQYRMRRYQNIPFLAQQT

SEQ ID NO: 59364 - protein, 459 aa, Homo sapiens
  DOMAIN (121)..(189): PTS HPr component phosphorylation sites domain identified by PFam, accession name PTS-HPr, E-value=0.00012, PFam score of 22.4
MRRLTLQDNPAIARVIRQVSAEYGLTADKGYTVADPNLDELYQVYSQPGHAYWVVDQLREEIIGPANAQVYSKVVSGSQNTMLGPFGSSDHLTSVNYRAGSENRTGREAMALIVEFICELPNGVHARPASHVETLCNTFSSQIEWHNLRTDRKGNAKSALALIGTDTLAGDNCQLLISGADEQEAHQRLSQWLRDEFPHCDAPLAEVKSDELEPLPVSLTNLNPQIIRARTVCSGSAGGILTPISSLDLDALEEQFVSADAGYQGAPQREELAEVDVDWLIAERPGKVRTLKQHPRKNKTAINIEYMKASIRARVEHPFRIIKRQFGFVKARYKGLLKNDNQLAMLFTLANLFRADQMIQYSLSQYTSPVSDLDGVDYPKPYRGKHKILVIAADERYLPTDNGKLFSTGNHPIETLLPLYHLHAAGFEFEVGDHFSGLMTKFEYWAIPHTDENSNCHLS

SEQ ID NO: 59365 - protein, 849 aa, Homo sapiens
  DOMAIN (558)..(610): ELEMENT TRANSPOSABLE INSERTION PROTEIN TRANSPOSITION DNA domain identified by eMATRIX, accession number PD02455C, p-value= 1.000e-40, raw score of 29.23
  DOMAIN (491)..(649): Integrase core domain identified by PFam, accession name rve, E-value=3.9e-42, PFam score of 149.7
MRKYNSLVVDMRKVSVVWIDQASHNIPLSQSQIQIRPFNSVKAERGEEATEEELEANTASGCASRLHSYLLALHCFTVRLCGVPSPHLFASSTASLPESPGCCMHSLVTKSPCGDPLEPDDATLFKQNLFYLETLNTKQKLYHKKIFRTAMLFQFVNVLLQVLVHKSHDLLQEEIGIAIYNMASVDFDGFFAAFLPEFLTSCDGVDANQKSVLGRNFKMDRVCEGISSLSRLQNELSYIEKFTDFLRLFVSVHLRRIESYSQFPVVEFLTLLFKYTFHQDLDIQPSQAVFGGIEFTYILVTLVILGTQRVPKPGCGQGGRANCPNSGANATANGTAAPAAAAAAATAYGERPTWRRADTAGRPATNASASGFPHRIELKAGKTITLEDGRQINGADYLAAPVPGKALAIFGDTGPCDAALDLAKGVDVMVHEATLDITMEAKANSRGHSSTRQAATLAREAGVGKLIITHVSSRYDDKGCQHLLRECRDFKATRPNEKWVTDVTEFAVNGRKLYLSPVIDLFNNEVISYSLSERPVMNMVENMLDQAFKKLNPHEHPVLHSDQGWQYRMRRYQNILKEHGIKQSMSRKGNCLDNAVVECFFGTLKSECFYLDEFSNISELKDAVTEYIEYYNSRRISLKLKALAVALANIDPIIELTSCADACKRTALVANPWQLGNVRDARTYKELLDQIAELLRILGSADRLMEVIREELELVREQFGDKRRTEITANSADINLEDLITQEDVVVTLSHQGYVKYQPLSEYEAQRRGGKGKSAARIKEEDFIDRLLVANTHDHILCFSSRGRVYSMKVYQLPEATRGARGRPIVNLLPLEQDERITAILPVTELGIL

SEQ ID NO: 59366 - protein, 94 aa, Homo sapiens
  DOMAIN (9)..(36): Protamine P1 proteins domain identified by eMATRIX, accession number BL00048, p-value=7.395e-10, raw score of 6.39
  misc_feature (1)...(94): Xaa = X or * as defined in Table 2
AKIVQLRPRILRPSRSARRCPSAPRSRRQRRRSGPLPEPAPRVSXQIFPSQYWRYRQSTENQKQRLDPRGQIVNVPARRIIRQKRKCCKVAGSA

SEQ ID NO: 59367 - protein, 428 aa, Homo sapiens
  DOMAIN (28)..(71): 1 kw MIND INHIBITOR DIVISION CONTROL domain identified by eMATRIX, accession number DM01756B, p-value=4.822e-15, raw score of 22.91
  DOMAIN (135)..(338): Transposase domain identified by PFam, accession name Transposase_15, E-value=2.4e-122, PFam score of 419.8
MGKFDEGKLPTDPHLMLRLAIETVAHDYDVIVIDSAPNLGIGTINVVCAADVLIVPTPAELFDYTSALQFFDMLRDLLKNVDLKGEFSSKRRQTRKEIFLSRMEQILPWQNMVEVIEPFYPKAAHRERPYPLETMLRIHCMQHWYNLSDGAMEDALYEIASMRLFARLSLDSALPDRTTIMNFRHLLEQHQLARQLFKTINRWLAEAGVMMTQGTLVDATIIEAPSSTKNKEQQRDPEMHQTKKGNQWHFGMKAHIGVDAKSGLTHSLVTTAANEHDLNQLGNLLHGEEQFVSADAGYQGAPQREELAEVDVDWLIAERPGKVRTLKQHPRKNKTAINIEYMKASIRARVEHPFRIIKRQFGFVKARYKGQIDIVSIHQPPSISLRKKDVAYYCRSAGSDERIRPKQLIYSLHLRRIFRTVLGLYLMS

SEQ ID NO: 59368 - protein, 80 aa, Homo sapiens
TGYRRDLAGSQYERYEWPGYSQCLAQGWRYRANYYPDRIRCLQRCLCADRRRRRRLSVERQRPGSIAGSDSCRSERQQSL

SEQ ID NO: 59369 - protein, 461 aa, Homo sapiens
  DOMAIN (143)..(333): Transposase domain identified by PFam, accession name Transposase_15, E-value=3.5e-86, PFam score of 299.7
SKLGAAMVIVAAWCVEDYQVIRLAGSLTARATRLAHEAQLDVAPLGKIPHLRTPGLLVMDMDSTAIQIECIDEIAKLAGTGEMVAEVTERAMRGELDFTASLRSRVATLKGADANILQQVRENLPLMPGLTQLVLKLETLGWKVAIASGGFTFFAEYLRDKLRLTSSRLPDRTTIMNFRHLLEQHQLARQLFKTINRWLAEAGVMMTQGTLVDATIIEAPSSTKNKEQQRDPEMHQTKKGNQWHFGMKAHIGVDAKSGLTHSLVTTAANEHDLNQLGNLLHGEEQFVSADAGYQGAPQREELAEVDVDWLIAERPGKVRTLKQHPRKNKTAINIEYMKASIRARVEHPFRIIKRQFGFVKARYKGLLKNDNQLAMLFTLANLFRVDQMIQARINAMLEGLAQKKDLIFVRNGDEHTCYEAVSHLRLKLGNTRNRIDTAEQFIDKVASSSSITGKPYIVKIP

SEQ ID NO: 59370 - protein, 138 aa, Homo sapiens
  DOMAIN (54)..(66): Gamma-thionins family proteins domain identified by eMATRIX, accession number BL00940B, p-value=7.000e-09, raw score of 12.41
  misc_feature (1)...(138): Xaa = X or * as defined in Table 2
RCRRCKRRLLRRFRRSLLSLAGSPENHARFYCRNSLPDEWFFRHHPRSTXPPRSREIRRCHCGXRQCSSDGRKITSVHRGRNADGRELTHQAVRLLAYLSDRFARHHRHLRNAHRRGPDRIPKERHFPATKLRHTPAV

SEQ ID NO: 59371 - protein, 714 aa, Homo sapiens
  DOMAIN (63)..(85): SUGAR TRANSPORTER SIGNATURE domain identified by eMATRIX, accession number PR00171D, p-value=8.953e-15, raw score of 12.76
  DOMAIN (222)..(423): Transposase domain identified by PFam, accession name Transposase_15, E-value=9.6e-114, PFam score of 391.3
MWGTVIVGLTNVLATFIAIGLVDRWGRKPTLTLGFLAMAAGMGVLGTMMHIGIHSPSAQYFAIAMLLMFIVGFAMSAGPLIWVLCSEIQPLKGRDFGITCSTATNWIANMIVGATFLTMLNTLGNANTFWVYAALNVLFILLTLWLAVMRRLREKLAQANLKLGRNYPEPKLSYTQRGTSAGTAWLESYEIRLNPVLLLENSEAFIEEVSGNGRRPYPLETMLRIHCMQHWYNLSDGAMEDALYEIASMRLFARLSLDSALPDRTTIMNFRHLLEQHQLARQLFKTINRWLAEAGVMMTQGTLVDATIIEAPSSTKNKEQQRDPEMHQTKKGNQWHFGMKAHIGVDAKSGLTHSLVTTAANEHDLNQLGNLLHGEEQFVSADAGYQGAPQREELAEVDVDWLIAERPGKNLETASTQEQTAINIEYMKASIRARVEHPFRIIKRQFVFGRIRRLRRIRHLSMMPDAALVASYQAYDFLRIRHKQRASAKQPNHCGTQHGSNGSLRAGGKRVEGQIKLVFPAKFEAGFRHGVIANLRARMPFRQVSGVGSNLIAGVAKHVGARNVVITDVNEYRLELARKMGITRAVNVAKENLNDVMAELGMTEGFDVGLEMSGAPPAFRTMLDTMNHGGRIAMLGIPPSDMSIDWTKVIFKGLFIKGIYGREMFETWYKMAALIQSGLDLSPIITHRFSIDDFQKGFDAMRSGQSGKVILSWD

SEQ ID NO: 59372 - protein, 821 aa, Homo sapiens
  DOMAIN (172)..(204): BCCT family of transporters proteins domain identified by eMATRIX, accession number BL01303E, p-value=5.500e-37, raw score of 10.12
  DOMAIN (392)..(587): Transposase domain identified by PFam, accession name Transposase_15, E-value=3.8e-111, PFam score of 382.7
MMNNGGSMDAAAVILIIVFIRSCTVLEPSIGIIISGMTIRNWIHAARAGTPFSFSSTVFLPKMPSGISEKKIFTGVAVHISREPNIAVKDTRPTSDSSTLPVDQIRRHAVEYLHRSAGAVSRHIDPVRMFMGDTSFLLNALVLNVGDYVNRFMGMTLNSFAFDRPVEWMNNWTLFFWAWWVAWSPFVGLFLARISRGRTIRQFVLGTLIIPFTFTLLWLSVFGNSALYEIIHGGAAFAEEAMVHPERGFYSLLAQYPAFTFSASVATITGLLFYVTSADSGALVLGNFTSQLKDINSDAPGWLRVFWSVAIGLLTLGMLMTNGISALQNTTVIMGLPFSFVIFFVMAGLYKSLKVEDYRRESANRDTAPRNRNSCATSSIYNRARYRKYRAHWYNLSDGAMEDALYEIASMRLFARLSLDSALPDRTTIMNFRHLLEQHQLARQLFKTINRWLAEAGVMMTQGTLVDATIIEAPSSTKNKEQQRDPEMHQTKKGNQWHFGMKAHIGVDAKSGLTHSLVTTAANEHDLNQLGNLLHGEEQFVSADAGYQGAPQREELAEVDVDWLIAERPGKVRTLKQHPRKNKTAINIEYMKASIRARVEHPFRIIKRQFGFVKARYKGLLKNDNQLAMLFTLANLFRADQMILSPSMIHRSKAVPCLMAQDSYIVFFVRRLLINTLLCQTHALQIPPTVREGCEQNTAEMSLLHQLHARRWGRFNGVQDLALIHKAPDLMVSWSYAYKARALTFITPKWMVSIFQAGSSPPLSVPLLLRSTHLECPLHPAHGIPPPSSIAAHLKYGDKNAFLSTSQRRNKPQIEKVDGKD

SEQ ID NO: 59373 - protein, 40 aa, Homo sapiens
FSIASPKRGSTRQTNCLPPSTRRCGVLTLQMSVKPYLQIP

SEQ ID NO: 59374 - protein, 671 aa, Homo sapiens
  DOMAIN (280)..(332): ELEMENT TRANSPOSABLE INSERTION PROTEIN TRANSPOSITION DNA domain identified by eMATRIX, accession number PD02455C, p-value= 1.000e-40, raw score of 29.23
  DOMAIN (213)..(365): Integrase core domain identified by PFam, accession name rve, E-value=2e-41, PFam score of 147.3
MSSSYESYDEEEEEGKSPQPRHQWPSEEASMHLVRECRICAFLLRKKRFGQWAKQLTVIREDQLLCYKSSKDRQPHLRLALDTCSIIYVPKDSRHKRHELRFTQGATEVLVLALQSREQAEEWLKHLKASSKPDKKADVKRRISEIYHENRGRYGYRRVTLSLHREGKQINHKAVQRLMGTLSLKAAIKVKRYRSYRGEVGQTAPNVLQRDFKATRPNEKWVTDVTEFAVNGRKLYLSPVIDLFNNEVISYSLSERPVMNMVENMLDQAFKKLNPHEHPVLHSDQGWQYRMRRYQNILKEHGIKQSMSRKGNCLDNAVVECFFGTLKSECFYLDEFSNISELKDAVTEYIEYYNSRRISLKLKAPNMSKPKYPFEKRLEVVNHYFTTDDGYRIISARFGVPRTQVRTWVALYEKHGEKGLIPKPKGVSADPELRIKVVKAVIEQHMSLNQAAAHFMLAGSGSVARWLKVYEERGEAGLRALKIGTKRNIAISVDPEKAASALELSKDRRIEDLERQVRFLETRLMYLKKLKALAHPTKKAAEIPRSTFYYHLKALSKPDKYADVKKRISEIYHENRGRYGYRRVTLSLHREGKQINHKAVQRLMGTLSLKAAIKVKRYRSYRGEAGKSEIKVAANLVSGEGLFPGDDHLFAPWGLFPKGTNPTHEGSTLVT

SEQ ID NO: 59375 - protein, 36 aa, Homo sapiens
  misc_feature (1)...(36): Xaa = X or * as defined in Table 2
FDSFHWHSHPMLCCDRGQHKENPQSRGPISCQXIQQ

SEQ ID NO: 59376 - protein, 282 aa, Homo sapiens
  DOMAIN (183)..(235): ELEMENT TRANSPOSABLE INSERTION PROTEIN TRANSPOSITION DNA domain identified by eMATRIX, accession number PD02455C, p-value= 1.000e-40, raw score of 29.23
  DOMAIN (116)..(275): Integrase core domain identified by PFam, accession name rve, E-value=5.5e-47, PFam score of 166.5
HFSGGYRNGIVKTLMRGQRRFWQHLLQAVVVQGSRHNSTLRIPKRISEIYHENRGRYGYRRVTLSLHREGKQINHKAVQRLMGTLSLKAAIKVKRYRSYRGEVGQTAPNVLQRDFKATRPNEKWVTDVTEFAVNGRKLYLSPVIDLFNNEVISYSLSERPVMNMVENMLDQAFKKLNPHEHPVLHSDQGWQYRMRRYQNILKEHGIKQSMSRKGNCLDNAVVECFFGTLKSECFYLDEFSNISELKDAVTEYIEYYNSRRISLKLKGLTPIEYRNQTYMPRV

SEQ ID NO: 59377 - protein, 106 aa, Homo sapiens
NDAYYHRLLLLNCHRRLLSADCSLLRRVGAQQPVSRRGIATDFSRCGYLATGNFAWSGGNFVCGDRRTARNGSGGLHQRYWAGYRRVDGAGIWPNRDGQGQLYAGH

SEQ ID NO: 59378 - protein, 526 aa, Homo sapiens
  DOMAIN (339)..(391): ELEMENT TRANSPOSABLE INSERTION PROTEIN TRANSPOSITION DNA domain identified by eMATRIX, accession number PD02455C, p-value= 1.000e-40, raw score of 29.23
  DOMAIN (272)..(426): Integrase core domain identified by PFam, accession name rve, E-value=8.5e-37, PFam score of 131.3
MSKPKYPFEKRLEVVNHYFTTDDGYRIISARFGVPRTQVRTWVALYEKHGEKGLIPKPKGVSADPELRIKVVKAVIEQHMSLNQAAAHFMLAGSGSVARWLKVYEERGEAGLRALKIGTKRNIAISVDPEKAASALELSKDRRIEDLERQVRFLETRLMYLKKLKALAHPTKKAAEIPRSTFYYHLKALSKPDKYADVKKRISEIYHENRGRYGYRRVTLSLHREGKQINHKAVQRLMGTLSLKAAIKVKRYRSYRGEVGQTAPNVLQRDFKATRPNEKWVTDVTEFAVNGRKLYLSPVIDLFNNEVISYSLSERPVMNMVENMLDQAFKKLNPHEHPVLHSDQGWQYRMRRYQNILKEHGIKQSMSRKGNCLDNAVVECLFGTLKSECFYLDEFSNISELKDAVTEYIEYYNSRRISLKLKDLYASCLTVQLFGVSTVMGLLIRILGSIFQKALNISKIESFVAVTTIFLGQNEIPAIVKRFMIAESHEVLPHLYGMGHCGSRRWYAEWRPLHRVHEPSGSLPWP

SEQ ID NO: 59379 - protein, 600 aa, Homo sapiens
  DOMAIN (485)..(537): ELEMENT TRANSPOSABLE INSERTION PROTEIN TRANSPOSITION DNA domain identified by eMATRIX, accession number PD02455C, p-value= 1.000e-40, raw score of 29.23
  DOMAIN (418)..(577): Integrase core domain identified by PFam, accession name rve, E-value=5.5e-47, PFam score of 166.5
EPWKSSIPRKIKTAINIEYMKASIRARVEHPFRIIKRQFGFVKARYKGLLKNDNQLAMLFTLANLFRADQMIHGQAVEIAGHKVDVLFRQQRNARKAAHGVRAVWQQMTMPGSEIEKRIKTLVIVVIVILHVLRRASTVNHVFIIVGVSGMGGKTYQQSAVPVADMTTARTMSVREPPRHQIGMLHRPMPTGHPRSRHLTAPTQHRVLVHDIRNAERVCSTHTLSSVTATCAPTHPPASRPSGQLSELCTTAPRELRALTDGRRLSNVALAAASNKACCVASLRGRIFPQSTAYNGLGQTCTMSSVGYDHSESLPSASDLPIHATPSAGVPGRALSKPDKYADVKKRISEIYHENRGRYGYRRVTLSLHREGKQINHKAVQRLMGTLSLKAAIKVKRYRSYRGEVGQTAPNVLQRDFKATRPNEKWVTDVTEFAVNGRKLYLSPVIDLFNNEVISYSLSERPVMNMVENMLDQAFKKLNPHEHPVLHSDQGWQYRMRRYQNILKEHGIKQSMSRKGNCLDNAVVECFFGTLKSECFYLDEFSNISELKDAVTEYIEYYNSRRISLKLKGLTPIEYRNQTYMPRVKLSNFLGSVLQGPCRQ

SEQ ID NO: 59380 - protein, 221 aa, Homo sapiens
  DOMAIN (56)..(85): Aspartate and ornithine carbamoyltransferases proteins domain identified by eMATRIX, accession number BL00097E, p-value=4.960e- 21, raw score of 21.57
  DOMAIN (89)..(218): Aspartate carbamoyltransferase regulatory ch domain identified by PFam, accession name PyrI, E-value=1.4e-71, PFam score of 251.2
VVMAEVDILYMTRVQKERLDPSEYANVKAQFVLRASDLHNAKANMKVLHPLPRVDEIATDVDKTPHAWYFQQAGNGIFARQALLALVLNRDLIGFKLLSLFKLTETDQRITIGLNLPSGEMGRKDLIKIENTFLSEDQVDQLALYAPQATVNRIDNYEVVGKSRPSLPERIDNVLVCPNSNCISHAEPVSSSFAVRKRANDIALKCKYCEKEFSHNVVLAN

SEQ ID NO: 59381 - protein, 96 aa, Homo sapiens
SRCMPAGILIGVVVLIFSLQHELLPAYALLMLIGVMGGFFVVPLNALLGENSAMLLMLGIYSLAVMIGIPVVPIGIGFGALFALAITALMHRFNFS

SEQ ID NO: 59382 - protein, 804 aa, Homo sapiens; identical to SEQ ID NO: 59159
  DOMAIN (643)..(671): NADH dehydrogenases domain identified by PFam, accession name NADHdh, E-value=4.8e-07, PFam score of 28.7

SEQ ID NO: 59383 - protein, 108 aa, Homo sapiens
DDQDADYRCGHNKFIHQIIYVMKMKIDRKRDVERINRFAVHQRANRQVNHPPVAVFHMPVTVAWHHHRRAGKEIHLATLSVFIGYGVTRKLADIRRTGGVIHRFTLTI

SEQ ID NO: 59384 - protein, 61 aa, Homo sapiens
LFWGAGDERLGTDRTARHHQAVARPRARRAGRARTALNALLMSLAGICQTQCRAAHLPDAE

SEQ ID NO: 59385 - protein, 1052 aa, Homo sapiens; identical to SEQ ID NO: 53902
  DOMAIN (431)..(443): 4Fe-4S ferredoxins iron-sulfur binding region proteins. domain identified by eMATRIX, accession number BL00198, p-value= 5.263e-12, raw score of 10.43
  DOMAIN (857)..(946): Potassium channel domain identified by PFam, accession name TrkA, E-value=7.7e-20, PFam score of 79.3

SEQ ID NO: 59386 - protein, 608 aa, Homo sapiens
  DOMAIN (48)..(63): Glycosyl hydrolases family 9 proteins domain identified by eMATRIX, accession number BL00592B, p-value=9.486e-09, raw score of 10.78
MDARLLSVPGIEEGGRLQLKGPNIMNGYLRVEKPGVLEVPTAENVRGEMERGWYDTGDIVRFDEQGFVQIQGRAKRFAKIAGEMVSLEMVEQLALGVSPDKVHATAIKSDASKGEALVLFTTDNELTRDKLQQYAREHGVPELAVPRDIRYLKQMPLLGSGKPDFVTLKSWGMKAVIVAQFLSAFGDNALLFATLALLKAQFYPEWSQPILQMVFVGAYILFAPFVGQVADSFAKGRVMMFANGLKLLGAASICFGINPFLGYTLDDKSVPHEEYVHMMVKHHNYHAQRLGLNGGLLHQAQFGANDLTPNLDTYSVSYEKPHASRRRKADRYPGGGAYGKTPATRPFYGSWPFAGLLLTCSFLRYPLILWITVLPPLSELIPLAAAERPSAASQRVNIRHRSGTRKTGIDNDQGCVVVVFRFHRPAETDGMRFSSVTAHHHHDVSVFDIHPVVGHRTATKCWSKTCYRWSVSDARLVVYRQHPEGAGKFLGQHPGFVAGTGGTQHTGRKPTVYRYALLVLFNKVSVTVSFHQLRNTGECFFPANALPFVRTWRTIFRVAQTVFTVDVIQQTGPFRAQRTTAYRMIRVTFNVINRFSGVFCAITQAIHQ

SEQ ID NO: 59387 - protein, 640 aa, Homo sapiens
MAHQVPHRDVVGKKQTSMSNEYSSVQSMQVAQYGIRIRYKNGGQICFRRKALVYIVNKQHEVHASMNWQDVSGKSAVPVKWLAQCRIMRIRIALRCHQTSLFPLYAGLPVWCDGGVSSRKKPDEVQATAIKSDASKGEALVLFTTDHELTRDKLQQYAREHGVPELAVPRDIRYLIQMPLLGSGQPDFVTLKSWGMKAVIVAQFLSAFGDNALLFATLALLKAQFYPEWSQPILQMVFVGAYILFAPFVGQVADSFAKGRVMMFANGLKLLGAASICFGINPFLGYTLVGVGAAAYSPAKYGILGELTTGSKLVKANGLMEASTIAAILLGSVAGGVLAYWHVLVALAACALAYGGAVVANIYIPKLAAARPGQSWNLINMTRSFLNACTSLWRNGETRFSLVGTSLFWGAGVTLRFLLVLWVPVALGITDNATPTYLNAMVAIGIVVGAGAAAKLVTLETVSRCMPAGILIGVVVLIFYLQHELLPAYALLMLIGVFWLRDWLRAISVCVMRFVIEIGLAGKDILNTLDHMVERQYQLFQLNGHGLRVEANVEIFRGNILDLTADAADRRVTFMYRQQYDKDDQDADYRCGHNKFIHQIIYVMKMKIDRKRDVERINRFAVHQRANRQVSHLTVLREDR

SEQ ID NO: 59388 - protein, 125 aa, Homo sapiens
TVLHHADKPNLYHGLPENPEISETVKFWKGIWKPLAAVGFAATFAASIFHYVGVGPNRADEEENNHWITAFCFILAAVSGLGFLFPSFNWLMQIMGTPQLARILHPFVGVVMFASFIIMFFRYWH

SEQ ID NO: 59389 - protein, 137 aa, Homo sapiens
GPGCNGVHRLCTEQRDVRGTVRIVLKTFNNCRDTVFVAFEVNNTVSLLVATTDMTSGDTAIVVTTTGFVSAANEVQILAFFQGDVSFFPVATTTDTLSVTFNFPFNYQGVNDFDFDFKQFLHSSFDFCFGRVFSNFE

SEQ ID NO: 59390 - protein, 580 aa, Homo sapiens
  DOMAIN (161)..(359): Cytochrome C assembly protein domain identified by PFam, accession name CytC_asm, E-value=0.022, PFam score of 9.1
MNVAGSHYPQQTDTGTENQTLHVLTYKSELNDENTWTHRGRGTAQTGAFDRQRLGGRALRKNRFLTSLRWDQTSSFSSEKFDHLNPSSLNSSKLFSVQLCSVAGEELRSFGGGEAIIYISGYSGTNGIRDSLLFSSLWLIPVFLFPKRIKIIAAVIGVVLWAASLAALCYYVIYGQEFSQSVLFVMFETNTNEASEYLSQYFSLKIVLIALAYTAVAVLLWTRLRPVYIPKPWRYVVSFALLYGLILHPIAMNTFIKNKPFEKTLDNPASRMEPAAPWQFLDRLYQYRSVFVSIMIGVVNLPIIHYSVEWWNTLHQGSTRMQQSIDPAMRSPLRWSIFGFLLLSATLTLMRMRNLILLMEKRRPWILSYLFDITEGEAIFMNIDAIAGLHAHITLNAIVLAKGNANNCHCQPKVVFVPREIRSAASAIASTAIQQAIARPSTVIATTLLSNSHGNSSDSTSVEMKAIINKLRILRGRSRPQRTRGPTPSSSANGTISQVNMVLKNGSPIEILPSPSCLCTNGSSVPSNTTSIAATSKTLFANSKDSRDHSALFTRERTLCPRAANSSSEPANHQHHKGED

SEQ ID NO: 59391 - protein, 189 aa, Homo sapiens
SPDRLSFAVISMGAVEHGCLSRSAVLYPPHAVNPPSHRYERRVAELKTRGYDNAGLYDPAGVGGTHVMYVLHHADKPNLYHGLPENPEISETVKFWKGIWKPLAAVGFAATFAASIFHYVGVGPNRADEEENNRLLLHPGGGERAGLFVPVLQLVDAYHGHTAAGANSAPVCRRGYVSLVHYHVFPYWH

SEQ ID NO: 59392 - protein, 46 aa, Homo sapiens
  misc_feature (1)...(46): Xaa = X or * as defined in Table 2
LQTQKDGIPAVVERLEYDPNLPRTSRWFRNDFSVPVLQLLGSPXCV

SEQ ID NO: 59393 - protein, 571 aa, Homo sapiens; identical to SEQ ID NO: 54739
  DOMAIN (507)..(549): Bacterial type II secretion system protein D proteins domain identified by eMATRIX, accession number BL00875C, p-value=4.115e- 31, raw score of 22.03
  DOMAIN (50)..(383): Protein of unknown function UPF0096 domain identified by PFam, accession name UPF0096, E-value=3.1e-63, PFam score of 223.5

SEQ ID NO: 59394 - protein, 2243 aa, Homo sapiens
  DOMAIN (589)..(608): CARBAMOYL-PHOSPHATE SYNTHASE PROTEIN CPSASE DOMAIN SIGNATURE domain identified by eMATRIX, accession number PR00098G, p-value= 7.188e-21, raw score of 7.22
  DOMAIN (522)..(862): Carbamoyl-phosphate synthase (CPSase) domain identified by PFam, accession name CPSase_L_chain, E-value=5.9e-68, PFam score of 239.2
MNGLLILTALLPFVGFAQPINTLNNPNQPGYQIPSQQRMQTQMQTQQIQQKGMLNQQLKTQTQLQQQHLENQINNNSQRVLQSQPGERNPARQQMLPNTNGGMLNSNRNPDSSLNQQHMLPERRNGDMLNQPSTPQPDIPLKTIGPNKPRGSSGAACCAASKASISNDDSSGGVIPAHSSRAASATILPVNGPVPVVGLISIFAIIPCSRQRSATCESNGSGSPLNILLYQLPASTRSKSCQFSSPATPQPLLRAGGSICAGRQGDLPPLKVMPVPTKTFGVHIRVSPYCLPSNDLRLGCPRLQPRDAFCDRLKVHPTHADAVRRSLIQIWMFRTAGRTPGRPDVKQYWFALSQHIRLIKLPRIVHDSRRNFGTGLPMSADSRLVGSSPSALRASCHSSAAAIARKIINGINNTLRFIRPPAQFFADSRAYDSEDQTDTAVRPTPSSARPPKSSEQMLFTEGRVQVTRDAAVNCRFGHHRPGSVVITFFRIQHRFRLAIARYADSRHTATPVRASHLFDITEATGFPIAKVAAKLAVGYTLDELMNDITGGRTPASFEPSIDYVVTKIPRFNFEKFAGANDRLTTQMKSVGEVMAIGRTQQESLQKALRGLEVGATGFDPKVSLDDPEALTKIRRELKDAGADRIWYIADAFRAGLSVDGVFNLTNIDRWFLVQIEELVRLEEKVAEVGITGLNADFLRQLKRKGFADARLAKLAGVREAEIQFATDTAYMYSTYEEECEANPSTDREKIMVLGGGPNRIGQGIEFDYCCVHASLALREDGYETIMVNCNPETVSTDYDTSDRLYFEPVTLEDVLEIVRIEKPKGVIVQYGAAGVPVIGTSPDAIDRAEDRERFQHAVERLKLTQPANATVTAIEMARREGRTRLATRWWSRPSYVLRGRAMAIVYDEADLRRYFQTAVTVYTMRRVPHPSSIRGAVTICHSSLVSELPFASSGIFFSSQFLKCSRAVRALVPVAHTALCLASCHTVRRLYPFTSFNRKPLWSPRVQQHRLGGYKHQTEVFTVIAPIKTRGTTCDVQLLASERWLPRRTTVAGNIGKRLDPKTRAAVTNGTTRISAGRWPRSRNQGGRKALRRDTQIPGTAGVCSGVTYPEETESARERWPRFTNGPDGEVIAIDVNDEQLKLAPEMGADLAINSHTEDAAKIVQKTYGGLFRLEVVCTAVVGYGAWVFRGAIAAPACYHPPVLVARGHAGRKLTAEMARNYDLILAMESEHIAQVTAIAPEVRGKTMLFGQWLEQKEIPDPYRKSQDAFEHVYAVHSHSLAGVLALSSLFSSPAGRSLGRSSPKAVSAVPPDVPPVPFARWSPRGITMSVAMPTVASGLTTHRQGYLYSPIDPQTNKPWPAMPQSFHNLCQRAATAAGYPDFQPDACLINRYAPGAKLSLHQDKDEPDLRAPIVSVSLGLPAIFQFGGLKRNDPLKRLLLEHGDVVVWGGESRLFYHGIQPLKAGFHPLTIDCRYNLTFRQAGAYDDRIWTRSIVAWPGVRHLDGDDFSPVITQAQQMPGFPYSEIPHLITVDFVRQTLLGAANTLIRSEKLGCGVNDLPLSLVLSWFEQKAIVILLTLLSLGVKNIVTGPTAPGFLTPDLLAVLNEKFGLRSITTVEEDMKQLLSASLSMTMPTNQCPWRMQVHHITQETPDVWTISLICHDYYPYRAGQYALVSVRNSAETLRAYTISSTPGVSEYITLTVRRIDDGVGSQWLTRDVKRGDYLWLSDAMGEFTCDDKAEDKFLLLAAGCGVTPIMSMRRWLAKNRRDPLESPTAGTPLARPCASQLTVLTPGTHFCADLSRNMTNSKGHRQNGQTERQRHAGKTDAYSGSLSHDVPVKPVQELWYSAKAEYLAGARYAANNINHILEEASQATQTAVNIAGKECNLEEQYQLGTEAALKPHLRTIIILKQGIVWCTSLPGNRVLLSRIPVFPDSNLLLAPAIDTVNRLPILLYQNQFADTRILVTISDQHIRGALNVPLKGVRYVLRVADDIIGPTGDVMTLNGHYPYTEKFMDVTCGTPPCVITSAFRSIEPELTVYTCLKKIEASFELIEENGDPKITSEIQLLKASGILQSLYSVGFVGIRDKNTSSYSFCHDGRTPDKGFESNEKLLIHPCYWLGLNLNRNALAPEEAEEINDEYDINIISDNSAIRNKTIGQITTHLDQIPIGNEGATEFEQWCLDALRIVFASHLTDIKSHPNGNAVQRRDIIGTNGGKSDFWKRVLEDYKTDKLFLMLKILKN

SEQ ID NO: 59395 - protein, 251 aa, Homo sapiens
  DOMAIN (69)..(81): 4Fe-4S ferredoxins iron-sulfur binding region proteins. domain identified by eMATRIX, accession number BL00198, p-value= 2.895e-12, raw score of 10.43
  DOMAIN (62)..(121): 4Fe-4S binding domain identified by PFam, accession name fer4, E-value=0.0021, PFam score of 20.0
LGDSFDASMIKGRELGLSHESAENDKLEWLIRKDGCMHCSDPGCLKACPAEGAIIQYANGIVDFQSEQCIGCGYCIAGCPFDIPRLNPEDNRVYKCTLCVDRVVVGQEPACVKTCPTGAIHFGTKESMKTLASERVAELKTRGYDNAGLYDPAGVGGTHVMYVLHHADKPNLYHGLPENPEISETVKFWKGIWKPLAAVGFAATFAASIFHYVGVGPNRADEEENNWVGQYSGVPGDSKADPSGGGGQPGT

SEQ ID NO: 59396 - protein, 490 aa, Homo sapiens
  DOMAIN (168)..(187): PROLYL OLIGOPEPTIDASE SERINE PROTEASE (S9A) SIGNATURE domain identified by eMATRIX, accession number PR00862A, p-value=7.923e- 17, raw score of 13.32
  DOMAIN (180)..(208): Prolyl oligopeptidase family domain identified by PFam, accession name Peptidase_S9, E-value=4.5e-13, PFam score of 46.4
MASFYLRSNRHGKNFGLYRTRMRDEQQWEELIPPRENIMLEGFTLFTDWLVVEERQRGLTSLRQINRKTREVIGIAFDDPAYVTWIAYNPEPETARLRYGYSSMTTPDTLFELDMDTGERRVLKQTEVPGFYAANYRSEHLWIVARDGVEVPVSLVYHRKHFRKGHNPLLVYGYGSYGASIDADFSFSRLSLLDRGFVYAIVHVRGGGCKINLVVDNGKIVRAEAAQGKTNQGTLCLKGYYGWDFINDTQILTPRLKTPMIRRQRGGKLEPVSWDEALNYVAERLSAIKEKYGPDAIQTTGSSRGLHQSVGNGAMSNAINEIDNTDLVFVFGYNPADSHPIVANHVINAKRNGAKIIVCDPRKIETARIADMHIALKNGSNIALLNAMGHVIIEENLYDKAFVASRTEGFEEYRKIVEGYTPESVEDITGVSASEIRQAARMYAQAKSAAILWGMGVTQFYQGVETVRSLTSLAMLTGNLGKPHAGVNPV

SEQ ID NO: 59397 - protein, 370 aa, Homo sapiens
  DOMAIN (249)..(301): Endopeptidase Clp serine proteins domain identified by eMATRIX, accession number BL00381B, p-value=1.000e-40, raw score of 21.42
  DOMAIN (200)..(368): Clp protease domain identified by PFam, accession name CLP_protease, E-value=1.5e-121, PFam score of 417.2
  misc_feature (1)...(370): Xaa = X or * as defined in Table 2
ASSQVKSGWLSAKIPVISSIYGPLLSVRLLSHAWPNSLCPQLHCFLPGAIWSASSLLKSGNRPLIRLASIVLPVPGGPISKRLCPPAAVHFQSSLSLFLTDNITEIMLXRPDTWTHVMYVLHHADKPNLYHGLPENPEISETVKFWKGIWKPLAAVGFAATFAASIFHYVGVGPNRADEEENNLHEEKDEERKCSQDIQLVKERVIFLTGQVEDHMANLIVAQMLFLEAENPEKDIYLYINSPGGVITAGMSIYDTMQFIKPDVSTICMGQAASMGAFLLTAGAKGKRFCLPNSRVMIHQPLGGYQGQATDIEIHAREILKVKGRMNELMALHTGQSLEQIERDTERDRFLSAPEAVEYGLVDSILTHRN

SEQ ID NO: 59398 - protein, 223 aa, Homo sapiens
  DOMAIN (56)..(68): 4Fe-4S ferredoxins iron-sulfur binding region proteins. domain identified by eMATRIX, accession number BL00198, p-value= 2.895e-12, raw score of 10.43
  DOMAIN (49)..(108): 4Fe-4S binding domain identified by PFam, accession name fer4, E-value=0.0021, PFam score of 20.0
AKFTVYIYAAALWTKFRDSCRSRDGCSDPGCLKACPAEGAIIQYANGIVDFQSEQCIGCGYCIAGCPFDIPRLNPEYNRVYKCTLCVDRVVVGQEPACVKTCPTGAIHFGTKESMKTLASERVAELKTRGYDNAGLYDPAGVGGTHVMYVLHHADKPNLYHGLPENPEISETVKFWKGIWKPLAAVGFAATFAASIFHYVGVGPNRADEEENNLHEEKDEERK

SEQ ID NO: 59399 - protein, 628 aa, Homo sapiens
  DOMAIN (23)..(126): FAD binding domain identified by PFam, accession name FAD_binding_2, E-value=5.6e-21, PFam score of 76.2
  misc_feature (1)...(628): Xaa = X or * as defined in Table 2
HRRRCRHGYPVPAYRCRIWKCGQFHPTGIAGCGRTGHRRLPWXRRLSAEQTWRTFYGALCAERQRPGGPXRGSRSIMIEIREGRGCDGPWGPHAKLKLDHLGKEVLESRLPGILELSRTFAHVDPSRFRLSHLSLHDGRYSDQSYRYNDTRDMVPINGSIHRIGREPHYHYQRGQQYIGLCRNCNVIDTHICIYLVDQPIMDDIRRLLLYSEISSAIIWLLPVVQGEHYMLVDPDTNEREERGRSETRGFPRVPLGRTVSTVWYPLSNAATLAATRCSRSPHAFAEPSSNNGFITATPLGRTHFLGMAFPPSACWRLLRAEPERVEAVLSASGMNKAMRCGVSLICNFRLDYAPIEKQWDLHFADYFAEDLKLLAPLAKDGLVDVDEKGIQVTAKGRIRRLRRIRHLSMMPDAALVASYQAYDFLRIRHKQRASAKQPNHCGTQHGSNGSLRTLWNSIDSGSVLTWCASLIFSSRKSLSPIQLVRSVDRGDVKKRYSMREFSLGETHSEAEFRELLEQNPSFVFFKPQSFAPVKGASAVPLVGRASVASDRSIIPPGTTLLAEVPLLDNNGKFNGQYELRLMVALDVGGAIKGQHFDIYQGIGPEAGHRAGWYNHYGRVWVLKTAPGA

SEQ ID NO: 59400 - protein, 152 aa, Homo sapiens
  misc_feature (1)...(152): Xaa = X or * as defined in Table 2
VIVGITSNSVTVAAVSSWCRTWVPVSVLCLNCYPASMALVRGVIRGVXTCLSLCPNCAAIFIFAFGAVIFCITSVGFLFPPMVYKSGLRFFVFTXMRDTGVPQRLRAPRRSLSAKLGPACPFAYIVPHIWCRWIGWGTCVCLAICVCVCVAD

SEQ ID NO: 59401 - protein, 113 aa, Homo sapiens
  misc_feature (1)...(113): Xaa = X or * as defined in Table 2
RSWEVSIVEFYVVRPTGHVXHASGNLSHHRKRHPLADQAARKGETVPPRGRRSWRTQAHPXHLRQHRGQHPASLPTRTGTPQPGRRAIYRIPVRTAGQFQRIEVGDFQRVGHQ

SEQ ID NO: 59402 - protein, 728 aa, Homo sapiens
  DOMAIN (662)..(685): DELTA CRYSTALLIN SIGNATURE domain identified by eMATRIX, accession number PR00145A, p-value=6.143e-27, raw score of 12.59
  DOMAIN (568)..(701): Lyase domain identified by PFam, accession name lyase_1, E- value=2.3e-39, PFam score of 143.7
MGGVLFGLSIGSMSGILCSAWLVKRFGTRNVILVTMSCALIGMMILSLALWLTSPLLFAVGLGVFGASFGSAEVAINVEGAAVEREMNKTVLPMMHGFYSLGTLAGAGVGMALTAFGVPATVHILLGGAGVVVLAMAFSEGSANDWLPLLMVDGHGFSPTSGSLIYAGFTLGMTVGRFTVVMRFMLKGDTQTPQREGWTRRTFRDLIREYRLTGRARRLAIRPGSPMIGQRLDDLKLRERYGANVIGVERWRRFRRVIVNVNGVSEFRARDVLLIDMSAADVDLRPFCSEPLLEPMVLRGEYFSDQALDVGMAEISLIPESELIGKSVREIGFRTRYGLNVVGLKRHGVALEGSLADEPLLLGDIILVVGNWKLIGLVARFLGSLLIAPRVSDPSRLISALRVLALLTLLFAVAFWAGAHVAWLMLVMIGFNLFFSPLGAHAAYYGFSAIYWQAAGYSASAVGYLWSLGVVAEVISLRYRARVVSCSGARPCAQPGPESILLSDVSGILDGKGQRIAEMTAAKAEPLIEQGIITDGMIVKVNAALNAARTLGRPVDIASWRHAEQLPALFNADQRFKQFNDSLRFDYRLAEQDIVGSVAWSKALVTVGVLTAEEQAQLEEALNVLLEDVRARPQQILESDAEDIHSWVEGKLIDKVGQLGKKLHTGRSRNDQVATDLKLWCKDTVSELLTANRQLQSALVKPHKTIRRGTDYPNLVIRPMRQNGGSLV

SEQ ID NO: 59403 - protein, 426 aa, Homo sapiens
  DOMAIN (17)..(63): CHAIN PROTEIN LIPOPOLYSACCHARIDE BIOSYNT domain identified by eMATRIX, accession number PD02629F, p-value=1.290e-13, raw score of 12.19
  DOMAIN (232)..(401): Potassium channel domain identified by PFam, accession name TrkA, E-value=9.7e-16, PFam score of 65.7
  misc_feature (1)...(426): Xaa = X or * as defined in Table 2
YLVEQLTKAHVNDVNFTPFKYQLSPSLPVKKDGPGKAIIVILSALIGGMLYCRVCIKRNADSPEVFSGFSDPNVVLIAAVFIIGDGLVRTGVATVMGTWLVKVAGNSEIKMLVLLMLTVAGLGAFMSSTGVVAIFIPVVLSVAMRMQTSPSRLMMPLSFAGLISGMMTLVATPPNLVVNSELLREGYHGFSFFSVTPIGLVVLVLGILYMLVMRFMLKGDTQTPQREGWTRRTFRDLIREYRLTGRARRLAIRPGSPMIGQRLDDLKLRERYGANVIGVERWRRFRRVIVNVNGVSEFRARDVSLIAMSAADVDLRQFCSERLLEPDGIARFSLIPESELIGESVREIGLRTRYGLNVVGLTRTGVALDGSLADEPLLLGDISWLWALESDRYAAMLGRSRSLTYRRGDEHCRASRSPAFWRAKGX

SEQ ID NO: 59404 - protein, 783 aa, Homo sapiens
  DOMAIN (528)..(575): Initiation factor 2 proteins domain identified by eMATRIX, accession number BL01176E, p-value=1.000e-40, raw score of 25.77
  DOMAIN (641)..(774): Initiation factor 2 domain identified by PFam, accession name IF2, E-value=7.8e-82, PFam score of 285.3
MIAITGATGQLGHYVIESLMKTVPASQIVAIVRNPAKAQALAAQGITVRQADYGDEAALTSALQGVEKLLLISSSEVGQRAPQHRNVINAAKAAGVKFIAYTSLLHADTSPLGLADEHIETEKMLADSGIVYTLLRNGWYSENYLASARHGGLSMDCRCSHSKSILRGSLSSEFFCREKMVFGSDSAINMASQHINIHTTGVMSENVTTAGGKPGNVLTVNGNYTGNNGLMTFNATLGGDNSPTDKMNVKGDTQGNTRVRVDNIGGVGAQTVNGIELIEVGGNSAGNFALTTGTVEAGAYVYTLAKGKGNDEKNWYLTSKWDGVTPADTPDPINNPPVVDPEGPSVYRPEAGGYNSLLMVTHGKVINGGRGILIESDGTRGRALVKRLVCQARTRILVVLLSPVYAADHRSNPAPECGAVNKIDRPEADPDRVKYVLSQYGILPEEWVGESQFVHGSAKAGTGIDELLDAILLQAEVLELKAVRKGMASGAVIESFLDKGRGPVATVLVREGTLHKGDIVLCGFEYGRVRAMRNELGQEVLEAGPSIPVEILGLSGVPAAGDEVTVVRDEKKAREVALYRQGKFREVKLARQQKSKLENMFANMTEGEVHEVNIVLKADVQGSVEAISDSLLKLSTDEVKVKIIGSGVGVIEAESLDLRYYSVIYNLIDEVKAAMSGMLSPELKQQIIGLAEVRDVFKSPKFGAIAGCMVTEGVVKRHNPIRVLRDNVVIYEGELESLRRFKDDVNEVRNGMECGIGVKNYNDVRTGDVIEVFEIIEIQRTIA

SEQ ID NO: 59405 - protein, 207 aa, Homo sapiens
  misc_feature (1)...(207): Xaa = X or * as defined in Table 2
ILRIMQRGMKQFAGLLRLSGIKMLPSAXXLGELLHAAGSFFQRGCLLFSTGGKIGVARRNFTGTGIDGIXTFADMSDGVSQRALHMXNALRQVAHFTAPVNGQGIRQVTTGDFANVSNNFCQRSKQHTANAVPRHQQNQYHHQRDNRQLPLGKSVIICVVSDDIAIQFFTAEGVLSKRFAHCLMPSLGGLSKIGPSMPLFRIISQFS

SEQ ID NO: 59406 - protein, 997 aa, Homo sapiens
  DOMAIN (670)..(718): CHEMOTAXIS CHEW PROTEIN domain identified by eMATRIX, accession number DM01794, p-value=1.000e-40, raw score of 26.50
  DOMAIN (664)..(803): CheW-like domain identified by PFam, accession name CheW, E- value=6.5e-53, PFam score of 189.2
MIAITGATGQLGHLFIESLMKTVPASQIVAIVRNPAKAQALAAQGITVRQADYGDEAALTSALQGVEKLLLISSSEVGQRAPQHRNVINAAKAAGVKFIAYTSLLHADTSPLGLADEHIETEKMLADSGIVYTLLRNGWYSENYLASAPAALEHGVFIGAAGDGKIASATRADYAAAAARVISERGHEGKVYELAGDSAWTLTQLAAELTKQSGKQVTYQNLSERDFAAALKSVGLPDGLADMLADSDVGASKGGLFDDSKTLSTLIGPPTTTVRMDAVALFVIVAFALSGTLTVPEVFSGFSDPNVVLIAALFIIGDGLVRTGVATVMGTWLVKVAGNSEIKMLVLLMLTVAGLGAFMSSTGVVAIFIPVVLSVAMRMQTSPSRLMMPLSFAGLISGMMTLVATPPNLVVNSELLREGYHGFSFFSVTPIGLVVLVLGILYMLVMRFMLKGDTQTPQREGWTRRTFRDLIREYRLTGRARRLAIRPGSPMIGQRLDDLKLRERYGANVIGVERWRRFRRVIVNVNGVSEFRARDVLLIDMSAADVDLRQFCSEQLLEPMVLRGEYFSDQALDVGMAEISLIPESELIGKSVREIGFRTRYGLNVVGLKRNGVALEGSLADEPLLLGDIILVVGNWKLIGMLAKQGRDFVALNLPEELASEPSGQEFLVFTLGDEEYGIDILKVQEIRGYDQVTRIANTPAFIKGVTNLRGVIVPIVDLRIKFSQVDVDYNDNTVVIVLNLGQRVVGIVVDGVSDVLSLTAEQIRPAPEFAVTLSTEYLTGLGALGDRMLILVNIEKLLNSEEMALLDSAASEVAQKSFVVSNQLREQQGELTSTWDLMLQTRINLSRSAVRMMMDSSNQQSNAKVELLDSARKTLAQAATHYKKFKSMAPLPEMVATSRNIDDKYKNYYTALTELIDLADGRCRQLCNSLMDNFIMDVQGSGYIDFGDGSPLNFFSYAGKNGHAYRSIGKVLIDRGESEKRRYVDAADSSLGRNTQ

SEQ ID NO: 59407 - protein, 56 aa, Homo sapiens
MMPAIALIVSVIASVVIGGAGSLAFPLPALIWCAVRYTPQIHLQGKFLVVELPDQK

SEQ ID NO: 59408 - protein, 179 aa, Homo sapiens
LGRTYMAISIKGVNTGVIRKSNNFIALALKIKEPRNKESLFFMSVMELRDLLIALESRLHQKHKLDAAAHLQYEQARDKVIFVTGAVEIVLVANSVIDISVGSPFSIPQMFSARLGIATMAICPIMVSFSVAAINSRDVITTAFVRDETFDLHGRGVRQFSAEETHQFFADDFRRHTTL

SEQ ID NO: 59409 - protein, 627 aa, Homo sapiens
  DOMAIN (115)..(130): Domain of unknown function domain identified by eMATRIX, accession number PF00990C, p-value=8.630e-09, raw score of 10.17
  DOMAIN (49)..(204): Domain of unknown function DUF9 domain identified by PFam, accession name DUF9, E-value=8.1e-07, PFam score of 28.8
MTAFHRGGYRTGINNIIPQIRPGVNSGHNNVRARTHQSIHAKIDAIGRGSHLHSNITIFKGRIPVSENLKRRCGYDRGRPLLEHIGVFKRIESGSVEIVLVANSVIDISKIVGDKGLVARMGGEEFAVAVPSVNPVDGLLMAEKIRKGVELQPFTWQQKTLYLTVSIGVGSGRASYLTLTDDFNKLMVEADTCLYRSKKDGRNRTSTMRYGVDGVAGIPFDNYPFAYMVSNLALAIILLDGGMRTQASSFRVALGPALSLATLGVLITSGLTGMMAAWLFNLDLIEGLLIGAIVGSTDAAAVFSLLGGKGLNERVGSTLEIESGSNDPMAVFLTITLIAMIQHHESNISWMFIVDILQQFGLGIVIGLGGGYLLLQMINRIALPAGLYPLLALSGGILIFSLTTALEGSGILAVYLCGFMAWASGSFRKTRLIFRIMCSASSVIAFNMLCGLLRQKDQKAVKPAAQTMRANPAFDTEKAIQELGTGEALISFLDAKGSPSVVERAMVIAPCSRMGPVTEDERNGLINHSPVYGKYEDEVDRESAYEMLQKGFQASTEQQNNPPAKGKEVAVDDGILGGLKDILFGTTGPRGGKKDGVVQTMAKSAARQVTNQIVRGMLGSLLGGRRR

SEQ ID NO: 59410 - protein, 209 aa, Homo sapiens
  misc_feature (1)...(209): Xaa = X or * as defined in Table 2
KHWSDSIPGTEADWSASTTSGCAGFAAFACSSSXVICLLSGAVAAYAPQLRHQAIRKVIIRRTSAFPLMDXTWSFLSSTNGLASCSASISSAGSGAGSASGVTKVSVDTASGWPIFVTDRLSSCSTRFTLPGANRLITVEPSLKRPISWPFSSATEPSFSPAGQVQRLMIPSRGGVMVPAQTVSMLPTIVAPTGPYSSHLLGSFTLSPP

SEQ ID NO: 59411 - protein, 571 aa, Homo sapiens
  DOMAIN (172)..(204): BCCT family of transporters proteins domain identified by eMATRIX, accession number BL01303E, p-value=5.500e-37, raw score of 10.12
  DOMAIN (392)..(571): Transposase domain identified by PFam, accession name Transposase_15, E-value=5.8e-96, PFam score of 332.2
MMNNGGSMDAAAVILIIVFIRSCTVLEPSIGIIISGMTIRNWIHAARAGTPFSFSSTVFLPKMPSGISEKKIFTGVAVHISREPNIAVKDTRPTSDSSTLPVDQIRRHAVEYLHRSAGAVSRHIDPVRMFMGDTSFLLNALVLNVGDYVNRFMGMTLNSFAFDRPVEWMNNWTLFFWAWWVAWSPFVGLFLARISRGRTIRQFVLGTLIIPFTFTLLWLSVFGNSALYEIIHGGAAFAEEAMVHPERGFYSLLAQYPAFTFSASVATITGLLFYVTSADSGALVLGNFTSQLKDINSDAPGWLRVFWSVAIGLLTLGMLMTNGISALQNTTVIMGLPFSFVIFFVMAGLYKSLKVEDYRRESANRDTAPRNRNSCATSSIYNRARYRKYRAHWYNLSDGAMEDALYEIASMRLFARLSLDSALPDRTTIMNFRHLLEQHQLARQLFKTINRWLAEAGVMMTQGTLVDATIIEAPSSTKNKEQQRDPEMHQTKKGNQWHFGMKAHIGVDAKSGLTHSLVTTAANEHDLNQLGNLLHGEEQFVSADAGYQGAPQREELAEVDVDWLIAERPGK

SEQ ID NO: 59412 - protein, 186 aa, Homo sapiens
  misc_feature (1)...(186): Xaa = X or * as defined in Table 2
TIPAKPVPSMVASGTVRFGFLTIPVLTAADSTPTKAHRQSRILLMIAXPSVVSAVFQLAAXVAASNQCQPTIAVITTGIRTSTRPIVACITGFVTGAVEIVLVANSVIDISVGSPFSIPQMFSARLGIATMAICPIMVSFSVAAINSASHNRQGFALQFFFNDAACGSGEFRILMQEEHPDSVVFC

SEQ ID NO: 59413 - protein, 260 aa, Homo sapiens
DFADFGTTIKQDFRLLGQTSVDRLLQLSQGQAVKGNQLLPVSLVKRKTTLAPNTQTASPRALADSLMQLARQVSRLESGHHWRSGESGVPAACINLVCSALYAAGNMSVDLCHRDFADFGTTIKQDFRLLGQTSVDRLLQLSQGQAVKGNQLLPVSLVKRKTTLAPNTQTASPRALADSLMQLARQVSRLESGIIGGAGSLAFPLPALIWCAVRYTPQVTCLLTFVTGILPISEPPSNRIFACWGKPAWTACCNSLRARR

SEQ ID NO: 59414 - protein, 488 aa, Homo sapiens
  DOMAIN (353)..(372): Domain of unknown function domain identified by eMATRIX, accession number PF00990B, p-value=3.919e-14, raw score of 12.15
  DOMAIN (312)..(477): Domain of unknown function DUF9 domain identified by PFam, accession name DUF9, E-value=4.5e-56, PFam score of 199.7
FFVMAGLYKSLKVEDYRRESANRDTAPRPLGLQDRLSWKKRLSRLMNYPGTRYTKQMMETVCYPAMEEVAQELRLRGAYVELKSLPPEEGQQLGHLDLLVHMGEEQNFVYQIWPQQYSVPGFTYRARSGKSTYYRLETFLLEGSQGNDLMDYSKEQRTCYLGSVSIDSLDFWPLLADWFSEQFSTGVLIVPCMLTLAIPGVLPRFKAEQMMPAIALIVSVIASVVIGGAGSLAFPLPALIWCAVRYTPQVTCLLTFVTGAVEIVLVANSVIDISVGSPFSIPQMFSARLGIATMAICPIMVSFSVAAINSLMKQVALRADFDFLTQVYSRSGLYEALKSPSLKQTQHLTVMLLDIDYFKSINDNYGHECGDKVLSVFARHIQKIVGDKGLVARMGGEEFAVAVPSVNPVDGLLMAEKIRKGVELQPFTWQQKTLYLTVSIGVGSGRASYLTLTDDFNKLMVEADTCLYRSKKDGRNRTSTMRYGEEVV

SEQ ID NO: 59415 - protein, 107 aa, Homo sapiens
  misc_feature (1)...(107): Xaa = X or * as defined in Table 2
MQTEQQRAVTRLCIQCGLFLLQHGAESALVDELSSRLGRALGMDSVESSISSNAIVLTTIKDGQCLTSTRKNHDRGINMHVVTEVQHIVILAEHHLPDPEPXEQQRR

SEQ ID NO: 59416 - protein, 100 aa, Homo sapiens
RYCFSTARPSVRICISSDPPETRSTRRSRQKRLMRWLPAIPTPPSTCIALSTTSNAALAQKYLHIAASPEVMVPLSAFHAASYSMFFMEFNLIAMWANFS

SEQ ID NO: 59417 - protein, 314 aa, Homo sapiens
PTAKQPCFMIQMDSHYLNNTQHVYDKGRVMQTEQQRAVTRLCIQCGLFLLQHGAESALVDELSSRLGRALGMDSVESSISSNAIVLTPIKDGQCLTSTRKNHDRGINMHVVTEVQHIVILAEHHLLDYKGVEKRFSQIQPLRYPRWLVALMVGLSCACFCKLNNGGWDGAVITFFASTTAMYIRQLLAQRHLHPQINFCLTAFAATTSTLSQLSAFSLSFMLLALLLVLRGDLLDRWQQQLPPESPNYFLINIATEQVAPLKAFLAEHQIVPESFYPVVRARLTAINDKPTEGNEDEALNRELNFTLANTAARS

SEQ ID NO: 59418 - protein, 231 aa, Homo sapiens; identical to SEQ ID NO: 37547
  DOMAIN (194)..(223): Homoserine dehydrogenase proteins domain identified by eMATRIX, accession number BL01042D, p-value=7.873e-18, raw score of 14.86
  DOMAIN (17)..(231): Homoserine dehydrogenase domain identified by PFam, accession name Homoserine_dh, E-value=3.7e-21, PFam score of 83.7

SEQ ID NO: 59419 - protein, 361 aa, Homo sapiens; identical to SEQ ID NO: 59342
  DOMAIN (102)..(154): ELEMENT TRANSPOSABLE INSERTION PROTEIN TRANSPOSITION DNA domain identified by eMATRIX, accession number PD02455C, p-value= 3.308e-38, raw score of 29.23
  DOMAIN (56)..(359): Na+ dependent nucleoside transporter domain identified by PFam, accession name Nucleoside_tra2, E-value=7.9e-45, PFam score of 162.4

SEQ ID NO: 59420 - protein, 54 aa, Homo sapiens
  misc_feature (1)...(54): Xaa = X or * as defined in Table 2
LAGCYTMLPGNGPAGMHACISKLDKXAAVKKRISEIIHENRGRYGYRRVPLSLH

SEQ ID NO: 59421 - protein, 54 aa, Homo sapiens
GTGAASAQRRFFYGHRRSSIAFQDPQCVGLLTAPMLMPLFLDQLILQCFFWCQS

SEQ ID NO: 59422 - protein, 969 aa, Homo sapiens
  DOMAIN (870)..(922): ELEMENT TRANSPOSABLE INSERTION PROTEIN TRANSPOSITION DNA domain identified by eMATRIX, accession number PD02455C, p-value= 1.000e-40, raw score of 29.23
  DOMAIN (803)..(962): Integrase core domain identified by PFam, accession name rve, E-value=5.5e-47, PFam score of 166.5
MFGRAHPSTPPLPVLAGPAWSLLARVAGRRRLAAGGPWARDIQRAGAWELRFSYRARCEPPAVGTACTRLCRPRSAPSRCGPGLRPCAPLEDECEAPLVCRAGCSPEHGFCEQPGECRCLEGWTGPLCTVPVSTSSCLSPRGPSSATTGCLVPGPGPCDGNPCANGGSCSETPRSFECTCPRGFYGLRCEVSGVTCADGPCFNGGLCVGGADPDSAYICHCPPGFQGSNCEKRVDRCSLQPCRNGGLCLDLGHALRCRCRAGFAGPRCEHDLDDCAGRACANGGTCVEGGGAHRCSCALGFGGRDCRERADPCAARPCAHGGRCYAHFSGLVCACAPGYMGARCEFPVHPDGASALPAAPPGLRPGDPQRYLLPPALGLLVAAGVAGAALLLVHVRRRGHSQDAGSRLLAGTPEPSVHALPDALNNLRTQEGSGDGPRLECMMPKRFDIPEQRMGKTGRAHRKKSRTGDLTLTKGALYQLSHISTLNLMPGSSLLSHGETPHYHRRYGVSLLSSAWGAAPLSSPAPTADRDRTVSRRSKPSSRTTLNGEQPYPWDLLQPQDVMSRHRGAKHRRRYELLGGLANLRAPPLLFRRRPPQSNYPPDTVRNPDYGSTLEHQTLKGGISSGSVARWLKVYEERGEAGLRALKIGTKRNIAISVDPEKAASALELSKDRRIEDLERQVRFLETRLMYLKKLKALAHPTKKAAEIPRSTFYYHLKALSKPDKYADVKKRISEIYHENRGRYGYRRVTLSLHREGKQINHKAVQRLMGTLSLKAAIKVKRYRSYRGEVGQTAPNVLQRDFKATRPNEKWVTDVTEFAVNGRKLYLSPVIDLFNNEVISYSLSERPVMNMVENMLDQAFKKLNPHEHPVLHSDQGWQYRMRRYQNILKEHGIKQSMSRKGNCLDNAVVECFFGTLKSECFYLDEFSNISELKDAVTEYIEYYNSRRISLKLKGLTPIEYRNQTYMPRV

SEQ ID NO: 59423 - protein, 847 aa, Homo sapiens
  DOMAIN (732)..(784): ELEMENT TRANSPOSABLE INSERTION PROTEIN TRANSPOSITION DNA domain identified by eMATRIX, accession number PD02455C, p-value= 1.000e-40, raw score of 29.23
  DOMAIN (60)..(263): Transposase domain identified by PFam, accession name Transposase_15, E-value=1.5e-119, PFam score of 410.5
MSHQLTFADSEFSSKRRQTRKEIFLSRMEQILPWQNMVEVIEPFYPKAGNGRRPYPLETMLRIHCMQHWYNLSDGAMEDALYEIASMRLFDRLSLDSALPDRTTIMNFRHMLEQHQLARQLFKTINRWLAEAGVMMTQGTLVDATIIEAPSSTKNKEQQRDPEMHQTKKGNQWHFGMKAHIGVDAKSGLTHSLVTTAANEHDFNQLGNLLHGEEQFVSADAGYQGAPQREELAEVDVDWLIAERPGKVRTLKQHPRKNKTAINIEYMKASIRARVEHPFRIIKRQFGFVKARYKGLLKNDNQLAMLFTLANLFRADQMIHGQAVEIAGHKVDVLFRQQRNARKAAHGVRAVWQQMTMPGSEIEKRIKTLVIVVIVILHVLRRASTVNHVFIIVGVSGMGGKTYQQSAVPVADMTTARTMSVREPPRHQIGMLHRPMPTGHPRSRHLTAPTQHRVLVHDIRNAERVCSTHTLSSVTATCAPTHPPASRPSGQLSELCTTAPRELRALTDGRRLSNVALAAASNKACCVASLRGRIFPQSTAYNGLGQTCTMSSVGYDHSESLPSASDLPIHATPSAGVPGRALSKPDKYADVKKRISEIYHENRGRYGYRRVTLSLHREGKQINHKAVQRLMGTLSLKAAIKVKRYRSYRGEVGQTAPNVLQRDFKATRPNEKWVTDVTEFAVNGRKLYLSPVIDLFNNEVISYSLSERPVMNMVENMLDQAFKKLNPHEHPVLHSDQGWQYRMRRYQNILKEHGIKQSMSRKGNCLDNAVVECFFGTLKSECFYLDEFSNISELKDAVTEYIEYYNSRRISLKLKGLTPIEYRNQTYMPRVKLSNFLGSVLQGPCRQ

SEQ ID NO: 59424 - protein, 522 aa, Homo sapiens; identical to SEQ ID NO: 59348
  DOMAIN (423)..(475): ELEMENT TRANSPOSABLE INSERTION PROTEIN TRANSPOSITION DNA domain identified by eMATRIX, accession number PD02455C, p-value= 1.000e-40, raw score of 29.23
  DOMAIN (356)..(515): Integrase core domain identified by PFam, accession name rve, E-value=5.5e-47, PFam score of 166.5

SEQ ID NO: 59425 - protein, 199 aa, Homo sapiens; identical to SEQ ID NO: 59352
  DOMAIN (61)..(113): ELEMENT TRANSPOSABLE INSERTION PROTEIN TRANSPOSITION DNA domain identified by eMATRIX, accession number PD02455C, p-value= 7.000e-10, raw score of 29.23

SEQ ID NO: 59426 - protein, 449 aa, Homo sapiens; identical to SEQ ID NO: 59355
  DOMAIN (350)..(402): ELEMENT TRANSPOSABLE INSERTION PROTEIN TRANSPOSITION DNA domain identified by eMATRIX, accession number PD02455C, p-value= 1.000e-40, raw score of 29.23
  DOMAIN (283)..(442): Integrase core domain identified by PFam, accession name rve, E-value=5.5e-47, PFam score of 166.5

SEQ ID NO: 59427 - protein, 129 aa, Homo sapiens; identical to SEQ ID NO: 59363
  DOMAIN (34)..(68): ELEMENT TRANSPOSABLE INSERTION PROTEIN TRANSPOSITION DNA domain identified by eMATRIX, accession number PD02455B, p-value= 7.366e-21, raw score of 21.87
  DOMAIN (38)..(122): Integrase core domain identified by PFam, accession name rve, E-value=3e-17, PFam score of 63.7

SEQ ID NO: 59428 - protein, 849 aa, Homo sapiens; identical to SEQ ID NO: 59365
  DOMAIN (558)..(610): ELEMENT TRANSPOSABLE INSERTION PROTEIN TRANSPOSITION DNA domain identified by eMATRIX, accession number PD02455C, p-value= 1.000e-40, raw score of 29.23
  DOMAIN (491)..(649): Integrase core domain identified by PFam, accession name rve, E-value=3.9e-42, PFam score of 149.7

SEQ ID NO: 59429 - protein, 286 aa, Homo sapiens; identical to SEQ ID NO: 59350
  DOMAIN (238)..(268): 2Fe-2S ferredoxins iron-sulfur binding region proteins. domain identified by eMATRIX, accession number BL00197A, p-value= 8.342e-14, raw score of 18.23
  DOMAIN (58)..(100): Integrase core domain identified by PFam, accession name rve, E-value=0.00034, PFam score of 18.5

SEQ ID NO: 59430 - protein, 832 aa, Homo sapiens
  DOMAIN (224)..(262): ELEMENT TRANSPOSABLE INSERTION PROTEIN TRANSPOSITION DNA domain identified by eMATRIX, accession number PD02455A, p-value= 2.091e-29, raw score of 25.65
  DOMAIN (414)..(494): DnaJ central domain (4 repeats) domain identified by PFam, accession name DnaJ_CXXCXGXG, E-value=1.1e-48, PFam score of 175.1
MLEEKYIASVLLFVAHGDCYLNSDSGPLGSRVHGNSRDLPSGNTGARGVNLSVSPTGADIPSAPPLLPYRQIADETLALMREMTHAGELEHLTPERVWKETESALTTRNPQVFFQVLRDCGALRVLFPEIDALFGVPAPAKWHPESYGMMDRRRNVVNPRPAHRGHVFRHIFVVQTRDTVQRRRVNDREVQLLVCRVEALSKPDKYADVKKRISEIYHENRGRYGYRRVTLSLHREGKQINHKAVQRLMGTLSLKAAIKVKRYRSYRGEVGQTAPNVLQRDFKATRPNEKWVTDVTEFAVNGRKLYLSPVIDLFNNEVISYSLSERPVMNMVENMLDQAFKKLNPHEHPVLHSDQGWQYRMRRYQNILKEHDFSDIFGDVFGDIFGGGRGRQRAARGADLRYNMELTLEEAVRGVTKEIRIPTLEECDVCHGSGAKPGTQPQTCPTCHGSGQVQMRQGFFAVQQTCPHCQGRGTLIKDPCNKCHGHGRVERSKTLSVKIPAGVDTGDRIRLAGEGEAAFGPQCQAVEQQDWCSETESVLYAFFRTWRGERNWLENMHGHDYEHHHHDHEHHHDHGHHHHHEHGEYQDAHARAHANDMCCFGHSRGSPNLNVHLYVIEGNEDIDHVPESLACRLLLRAWQHLDARQPQQACELLHAALHYPENLSEGRLPGQTDNDIWFWQAICANAQGDETEATRCLRLAATGDRTINIHSYYNDQPVDYLFWQGMALRLLGEQQTAQQLFSEMKQWAQEMAKTSIEADFFAVSQPDLLSLYGDLQQQHKEKCLMVAMLASAGLGEVAQYESARAELTAINPAWPKAALFTTVMPFIFNRVH

SEQ ID NO: 59431 - protein, 684 aa, Homo sapiens
  DOMAIN (495)..(533): ELEMENT TRANSPOSABLE INSERTION PROTEIN TRANSPOSITION DNA domain identified by eMATRIX, accession number PD02455A, p-value= 2.091e-29, raw score of 25.65
  DOMAIN (599)..(683): EPSP synthase domain identified by PFam, accession name EPSP_syntase, E-value=3.2e-37, PFam score of 137.1
VIRLGAQQVVDIDAQFTCVDWVQRVFSIDKRTGFTFTLRCGDHLQRQRGFTGRFRSVDFDDTAHRQTTCPKRDIHASRRVMFLAMVSYIKRARSMRDIRNEKGTAKPDPAVMKRLIQLGLPIALALFFEVTLFAVVALLVSPLGIVDVAGHQIALNFSSLMFVLPMSLAAAVTIRVGYRLGQGSTLDAQTAARTGLMVGVCMATLTAIFTVSLREQIALLYNDNPEVVTLAAHLMLLAAVYQISDSIQVIGSGILRGYKDTRSIFYITFTAYWVLGLPSGYILALTDLVVEPMGQQASDSLLLPTTLHWIKMKTIEVDDELYSYIASHTKHIGESASDILRRMLKFSAASQPAAPVTKEVRVASPAIVEAKPVKTIKDKVRAMRVYEERGEAGLRALKIGTKRNIAISVDPEKAASALELSKDRRIEDLERQVRFLETRLMYLKKLKALAHPTKKAAEIPRSTFYYHLKALSKPDKYADVKKRISEIYHENRGRYGYRRVTLSLHREGKQINHKAVQRLMGTLSLKAAIKVKRYRSYRGEVGQTAPNVLQRDFKATRPNEKWVTDVTEFAVNGRKLYLSPVIDLFNNEVISYSLSERPNTVIRIKGDLVSKPYIDITLNLMKTFGVEIENQHYQQFVVKGGQSYQSPGTYLVEGDASSASYFLAAAAIKGGTVKVTGIGRNSMP

SEQ ID NO: 59432 - protein, 311 aa, Homo sapiens; identical to SEQ ID NO: 59358
  DOMAIN (163)..(222): Integrase core domain identified by PFam, accession name rve, E-value=0.0003, PFam score of 18.7

SEQ ID NO: 59433 - protein, 522 aa, Homo sapiens
  DOMAIN (423)..(475): ELEMENT TRANSPOSABLE INSERTION PROTEIN TRANSPOSITION DNA domain identified by eMATRIX, accession number PD02455C, p-value= 1.000e-40, raw score of 29.23
  DOMAIN (356)..(515): Integrase core domain identified by PFam, accession name rve, E-value=5.5e-47, PFam score of 166.5
MQLVGDIKGDAKILMGKIDHEGGRKISAEDFVWPGSGEVTFTGGGTAHHFDGNIEGKIQGFAQNGGFCRKRIERDAHVVVDELNADPHARTASVDQLTAHRHQDRCGTFNLFSGAASQQIISARFGVPRTQVRTWVALYEKHGEKGLIPKPKGVSADPELRIKVVKAVIEQHMSLNQAAAHFMLAGSGSVARWLKVYEERGEAGLRALKIGTKRNIAISVDPEKAASALELSKDRRIEDLERQVRFLETRLMYLKKLKALAHPTKKAAEIPRSTFYYHLKALSKPDKYPDVKKRISEIYHENRARYGYQGKQINHKAVQRLMGTLSLKAAIKVKRYRSYRGEVGQTAPNVLQRDFKATRPNEKWVTDVTEFAVNGRKLYLSPVIDLFNNEVISYSLSERPVMNMVENMLDQAFKKLNPHEHPVLHSDQGWQYRMRRYQNILKEHGIKQSMSRKGNCLDNAVVECFFGTLKSECFYLDEFSNISELKDAVTEYIEYYNSRRISLKLKGLTPIEYRNQTYMPRV

SEQ ID NO: 59434 - protein, 534 aa, Homo sapiens
  DOMAIN (446)..(498): ELEMENT TRANSPOSABLE INSERTION PROTEIN TRANSPOSITION DNA domain identified by eMATRIX, accession number PD02455C, p-value= 1.000e-40, raw score of 29.23
  DOMAIN (379)..(533): Integrase core domain identified by PFam, accession name rve, E-value=1.7e-41, PFam score of 147.5
MKVPRGDVMFQLNLRKDDGQFEDQLLLLVLLPKHRGHLLLQVADDVWFKNRRAKCRQQRQQQKQQQQPPGGQAKARPAKRKAGTSPRPSTDFRSRDGIPEKATRTSCPSDSSVFSLQRPPLSSTGRGSSLSWDSSQVLVILSTLTPSGTIVTAEPKYPFEKRLEVVNHYFTTDDGYRIISARFGVPRTQVRTWVALYEKHGEKGLIPKPKGVSADPELRIKVVKAVIEQHMSLNQAAAHFMLAGSGSVARWLKVYEERGEAGLRALKIGTKRNIAISVDPEKAASALELSKDRRIEDLERQVRFLETRLMYLKKLKALAHPTKKVTLSLHREGKQINHKAVQRLMGTLSLKAAIKVKRYRSYRGEVGQTAPNVLQRDFKATRPNEKWVTDVTEFAVNGRKLYLSPVIDLFNNEVISYSLSERPVMNMVENMLDQAFKKLNPHEHPVLHSDQGWQYRMRRYQNILKEHGIKQSMSRKGNCLDNAVVECFFGTLKSECFYLDEFSNISELKDAVTEYIEYYNSRRISLKLKGLTPI

SEQ ID NO: 59435 - protein, 372 aa, Homo sapiens
  DOMAIN (279)..(317): ELEMENT TRANSPOSABLE INSERTION PROTEIN TRANSPOSITION DNA domain identified by eMATRIX, accession number PD02455A, p-value= 2.091e-29, raw score of 25.65
  DOMAIN (338)..(368): Integrase core domain identified by PFam, accession name rve, E-value=1.1e-05, PFam score of 23.7
GSNIVEANDRVHPVERKYPRQQRGYHWCGERRDADSPQYAGEPGTAPNMSKPKYPFEKRLEVVNHYFTTDDGYRIISARFGVPRTQVRTWVALYEKHGEKGLIPKPKGVSADPELRIKVVKAVIEQHMSLNQAAAHFMLAGSGSVARWLKVYEERGEAGLRALKIGTKRNIAISVDPEKAASALELSKDRRIEDLERQVRFLETRLMYLKKLKALAPSPKKVKVLNELRQFYPLDELLRAAEIPRSTFYYHLKALSKPDKYADVKKRISEIYHENRGRYGYRRVTLSLHREGKQINHKAVQRLMGTLSLKAAIKVKRYRSYRGEVGQTAPNVLQRDFKATRPNEKWVTDVTKLAVNGRNQYLSTVIDLRVPS

SEQ ID NO: 59436 - protein, 282 aa, Homo sapiens; identical to SEQ ID NO: 59376
  DOMAIN (183)..(235): ELEMENT TRANSPOSABLE INSERTION PROTEIN TRANSPOSITION DNA domain identified by eMATRIX, accession number PD02455C, p-value= 1.000e-40, raw score of 29.23
  DOMAIN (116)..(275): Integrase core domain identified by PFam, accession name rve, E-value=5.5e-47, PFam score of 166.5

SEQ ID NO: 59437 - protein, 1127 aa, Homo sapiens
  DOMAIN (940)..(992): ELEMENT TRANSPOSABLE INSERTION PROTEIN TRANSPOSITION DNA domain identified by eMATRIX, accession number PD02455C, p-value= 1.000e-40, raw score of 29.23
  DOMAIN (70)..(355): Iron-containing alcohol dehydrogenases domain identified by PFam, accession name Fe-ADH, E-value=5.1e-179, PFam score of 608.1
MSEKLQKVASARAGHGSRREIESIIEAGRVSDDGEIAKLGDNVEAWYRARLAGAFTLQECVMAASTFFIPSVNVIGADSLTDAMNMMADYGFTRTLSVTDNMLTKLGMAGDVQKALEERNIFSVIYDGTQPNPTTENVAAGLKLLKENNCDSVISLGGGSPHDCAKGIALVAANGGDIRDYEGVDRSAKPQLPMIAINTTAGTASEMTRFCIITDEARHIKMAIVDKHVTPLLSVNDSSLMIGMPKSLTAATGMDALTHAIEAYVSIAATPITDACALKAVTMIAENLPLAVEDGSNAKAREAMAYAQFLAGMAFNNASLGYVHAMAHQLGGFYNLPHGVCNAVLLPHVQVFNSNERGEISDEAFAEALCHEMALPLSYEQFSHGWQAVFVALRPEVIAIMHKLREQGHRVVVLSNTNRLHTTFCKVLVEKAVSMARPYNAKVSLIHVDVNYSDLYTGLIDVNLGDMQKRISEETHHALTELSTNAGYPITETLSGSGDLGQVLVDAIKKYDMDLVVCGHHQDFWSKLMSSARIAIGGNATSANLMGISTRSTTIRIYMLSTGLATLAGIVFSIYTQAGYALAGVGVELDAIASVVIGAPNMSKPKYPFEKRLEVVNHYFTTDDGYRIISARFGVPRTQVRTWVALYEKHGEKGLIPKPKGVSADPELRIKVVKAVIEQHMSLNQAAAHFMLAGSGSVARWLKVYEERGEAGLRALKIGTKRNIAISVDPEKAASALELSKDRRIEDLERQVRFLETRLMYLKKLKALAHPTKKAAEIPRSTFYYHLKALSKPDKYADVKKRISEIYHENRGRYGYRRVTLSLHREGKQINHKAVQRLMGTLSLKAAIKVKRYRSYRGEVGQTAPNVLQRDFKATRPNEKWVTDVTEFAVNGRKLYLSPVIDLFNNEVISYSLSERPVMNMVENMLDQAFKKLNPHEHPVLHSDQGWQYRMRRYQNILKEHGIKQSMSRKGNCLDNAVVECLFGTLKSECFYLDEFSNISELKDAVTEYIEYYNSRRISLKLKDLYASCLTVQLFGVSTVMGLLIRILGSIFQKALNISKIESFVAVTTIFLGQNEIPAIVKRFMIAESHEVLPHLYGMGHCGSRRWYAEWRPLHRVHEPSGSLPWP

SEQ ID NO: 59438 - protein, 425 aa, Homo sapiens
  DOMAIN (246)..(298): ELEMENT TRANSPOSABLE INSERTION PROTEIN TRANSPOSITION DNA domain identified by eMATRIX, accession number PD02455C, p-value= 1.000e-40, raw score of 29.23
  DOMAIN (179)..(331): Integrase core domain identified by PFam, accession name rve, E-value=2e-41, PFam score of 147.3
GNAGYVPSCCVYKCFGQWAKQLTVIREDQLLCYKSSKDRQPHLRLALDTCSIIYVPKDSRHKRHELRFTQGATEVLVLALQSREQAEEWLKHLKASSKPDKKADVKRRISEIYHENRGRYGYRRVTLSLHREGKQINHKAVQRLMGTLSLKAAIKVKRYRSYRGEVGQTAPNVLQRDFKATRPNEKWVTDVTEFAVNGRKLYLSPVIDLFNNEVISYSLSERPVMNMVENMLDQAFKKLNPHEHPVLHSDQGWQYRMRRYQNILKEHGIKQSMSRKGNCLDNAVVECFFGTLKSECFYLDEFSNISELKDAVTEYIEYYNSRRISLKLKAPNMSKPKYPFEKRLEVVNHYFTTDDGYRIISARFGVPRTQVRTWVALYEKHGEKGLIPKPKGVSADPELRIKVVKAVIEQHMSLNQAAAHFMRCW

SEQ ID NO: 59439 - protein, 125 aa, Homo sapiens
  DOMAIN (2)..(44): Flagellar P-ring protein domain identified by PFam, accession name FlgI, E-value=5.1e-11, PFam score of 44.8
ANVSQPDTPFGGGQTVVSPQTQIDLRQSGVSLQSVRSSASLNNVCGMSAAKTVYHLMISVSILLASAAWDAQSLTELKSKPVEDPAANICLVARQVEGMFAQIMLNSMRDALPKDGLFSSEHTRL

SEQ ID NO: 59440 - protein, 1693 aa, Homo sapiens; identical to SEQ ID NO: 48185
  DOMAIN (821)..(876): Fimbrial biogenesis outer membrane usher protein domain identified by eMATRIX, accession number BL01151, p-value=1.643e-38, raw score of 29.09
  DOMAIN (667)..(890): Fimbrial Usher proteins domain identified by PFam, accession name Usher, E-value=2.3e-111, PFam score of 383.4

SEQ ID NO: 59441 - protein, 74 aa, Homo sapiens
  misc_feature (1)...(74): Xaa = X or * as defined in Table 2
RMPKRRRWGKLSTIRCSTTCKKRLTXIVLPVRTPGRLCSSLKSVPASHCLASCKAYSNKPWKRQPSKRHYVTMR

SEQ ID NO: 59442 - protein, 156 aa, Homo sapiens
  misc_feature (1)...(156): Xaa = X or * as defined in Table 2
VPLAVPYGRLWRTIFSPLPSSFRSTRVRXEVSGRSSPSISSLASLVRPITSLLIVNAHPVELLQVVFPTLDKHIAAARIHAVFDNRHFATRLFTRRVFRTVNKAAQVTLFNPTEAVDLFFHFNAVTKGFHLRQGDKEGYVQAHTNNGDLRVRTSNP

SEQ ID NO: 59443 - protein, 579 aa, Homo sapiens
  DOMAIN (300)..(322): Arenaviral nucleocapsid protein domain identified by eMATRIX, accession number PF00843A, p-value=7.188e-10, raw score of 11.39
  DOMAIN (339)..(579): Flagellar P-ring protein domain identified by PFam, accession name FlgI, E-value=1.9e-138, PFam score of 473.4
PRLCWVSRRLHKDAARLNIACQRGASKRRLSKDRVDAGGSYVFVQRWEHNLKQLNRMSVHDQEMVIGRTKEANEEIDGDERPETSHLTRVDLKEDGKGLKIVRQSLPYGTASGTHGLYFCAYCARLHNIEQQLLSMFGDTDAVARTISGNHANDFAKTISNTRAPDGDKVVVRRKAFEIGIDKRWQRINNVIAIKRERFNPFSLIATVKLASINTRRFDQRIQFTHCVAPLLFYRINTRHNLRITINIAQQRLRPFPGFKDDLGYFTRQLKQVATQQIGAGSFNMSAAFLSTQGFHVDHTAELRGIRWTSSLRRETSDYHRTLTPTLEALMMYVGVSSPLKNVGTQVYKLAQGNILVGGAGASAGGSSVQVNQLNGGRITNGAVIERELPSQFGVGNTLNLQLNDEDFSMAQQIADTINRVRGYGSATALDARTIQVRVPSGNSSQVRFLADIQNMQVNVTPQDAKVVINSRTGSVVMNREVTLDSCAVAQGNLSVTVNRQANVSQPDTPFGGGQTVVTPQTQIDLRQSGGSLQSVRSSASLNNVVRALNALGATPMDLMSILQSMQSAGCLRAKLEII

SEQ ID NO: 59444 - protein, 59 aa, Homo sapiens
SMSHSFIFFLHTHSLGHFSQSNDFKCHLDICNSPDCIFTFLLNSTCIFLATFLILPLEC

SEQ ID NO: 59445 - protein, 589 aa, Homo sapiens
  DOMAIN (145)..(186): glpT family of transporters proteins domain identified by eMATRIX, accession number BL00942E, p-value=1.000e-40, raw score of 21.14
MLILSAICMLGFSASMGSGSVSLFLMIAFYALSGFFQSTGGSCSYSTITKWTPRRKRGTFLGFWNISHNLGGAGAAGVALFGANYLFDGHVIGMFIFPSIIALIVGFIGLRYGSDSPESYGLGKAEELFGEEISEEDKETESTDMTKWQIFVEYVLKNKVIWLLCFANIFLYVVRIGIDQWSTVYAFQELKLSKAVAIQGFTLFEAGALVGNGCSYAQGMWGKTAETSDLQDLLIAALQGLSAWAVKAREYGIINHDVDSFAPRAFFSTLTNVNFDSPRIVGYAREAIALREALKAQCLAVDANARVDNPMADLQLVSDDLGELQRQAAEFTPNKDKAAIGENILGLRLLCLYGLKVFNGREDQLDSCYHGNRQLRGSLRLLFLAFIRQRLRDLIITAHRVIRVNRQHAALGVKHCRLPGITGNRIQRQATQYRDRRGTGQNQCMRGDMQQLFADIANVANTFAQIIAGRGRKFGANLLHIADDRRPQPLMLFCHQATDIACKFIILNQRQMGAEDSFAFAVTLTQLLVQLLGKRCQAVLQPDGQCTLDSDPDDMKDFMENVLRYLSDDRWKPTRKPRMTVGTKHVDTV

SEQ ID NO: 59446 - protein, 833 aa, Homo sapiens; identical to SEQ ID NO: 59286
  DOMAIN (256)..(297): glpT family of transporters proteins domain identified by eMATRIX, accession number BL00942E, p-value=1.628e-33, raw score of 21.14
  DOMAIN (719)..(810): 6-pyruvoyl tetrahydropterin synthase domain identified by PFam, accession name PTPS, E-value=1.6e-36, PFam score of 134.8

SEQ ID NO: 59447 - protein, 202 aa, Homo sapiens
  DOMAIN (162)..(179): Zinc finger C2H2 type, domain proteins. domain identified by eMATRIX, accession number BL00028, p-value=3.314e-09, raw score of 16.07
GRRAPAGAAGVAAGPASRGVPLHQYCARPGLRHLRGAEDPARHLDWTFPRRASAPREGAGRRREEHAASLGVNVPSTVMEAMCRQDALQPFNKSSKLAPTTQQRSVVFPQTPCSRNFSLLDKSGPIESGFNQINVKNQRVLASPTSTSQLHSEFSDWHLWKCGQCFKTFTQRILLQMHVCTQNLDRPYQCCHWSQFFYQPSD

SEQ ID NO: 59448 - protein, 104 aa, Homo sapiens
LRHVRGQPQRRVPYAWATALAAPACGHQQRCGRRAPAGAAGVAAGPASRGVPLHQYCARPGLRHLRGAEDPARHLDWTFPRRASAPREGAGRRREEHAASLGDI

SEQ ID NO: 59449 - protein, 312 aa, Homo sapiens
  DOMAIN (209)..(250): glpT family of transporters proteins domain identified by eMATRIX, accession number BL00942G, p-value=5.821e-39, raw score of 18.21
WKWRSMKPALSHHRQTSVRRRATLRLVMVISKTIAELERIGRRRSEQNLPYSAGEIIPTASAVGGKCWSTLDRHTIQMLHDVVKAFARMDIDETAKCQIFVEYVLKPKVIWLLCFANIFLYVVRIGIDQWSTVYAFQELKLFKAVAIQGFTLFEAGALVGTLLWGWLSDLANGRRGLVACIALALIIATLGVYQHASNEYIYLASLFALGFLVFGPQLLIGVAAVGFVPKKAIGAADGIKGTFAYLIGDSFAKLGLGMIADGTPVFGLTGWAGTFAALDIAAIGCICLMAIVAVMEERKIRREKKIQQLTVA

SEQ ID NO: 59450 - protein, 697 aa, Homo sapiens
MVRHTKPTGTTQPPQRLTHETRAIRQPPNWHPAHTHQWCNHTNAESQHRNPRLQLETRICANPKQRHSQAHHTHHVHHQTQQRNNTTTDTSTHATKRILEPTPNPSTTSTTQCGTTQKTRRHPLHPPPRHPQQRKPARTHQHHPSRNRSATQQHVSTTNKLPTHEHEPHHRRSTHTSTRELTVPPHSDPPQTNTAGGHKPPTEVITTPPPRDHHTRRPTPTPTTTRYPTFSHTATDPQNTTDHPHPTPVHTNNTDSDYSHKTLIPDTQSLNVVIYDKPRMELAALTNSPMGTSKGRAGRMGVHFVGKIFCLEEIPEDNLNQEVDIPLGIQGIDTPINLLASVQPDHLSEFSQDRFDEVIHKRPCFHRPCEEAFVLPCRAVRMCWKANQGKVQGFTPEAIDALVQRPECDVILIEADGSRGMPLKAPDEHEPCIPKSSCCVIAVMGGHTLGAKVSTENVHRWSQFADITGLTPDATLQLSDLVALVRHPQGAFKNVPQGCRRVWFINRFSQCENAIAPSELLQPLQQHDICELAARVFRVTERISIEVGMNIFTEAAKLEEQNCPFAMAQIVDSRGSTPRHSAQMLVRADGSIVGTIGGGMVERKSHTLSGGLFITLTYPVPRGKLFDPSMPTSNTVNPRSKARPAEDLVCWEQVAIVTAVQVRTTVEMLRLSKTHILVLQDDTMTVNRKFLTYTTLS

SEQ ID NO: 59451 - protein, 250 aa, Homo sapiens
  DOMAIN (115)..(249): Formamidopyrimidine-DNA glycosylase domain identified by PFam, accession name Fapy_DNA_glyco, E-value=9.3e-05, PFam score of -80.0
MQLPPETVYAQTLYQIGALATIARAQGGVMRHVKPHGMLYNQAAKEAQLADAIARAVYACDPALILVGLAGSELIRAGKQYGLTTREEVFADRGYQADGSLVPRSQSGALIENEEQALAQTLEMVQHGRVKSITGEWATVAAQTLKPYQSQLIGQHVTHVETRGKALLTHFSNDLTLYSHNQLYGVWRVVDTGEEPQTTRVLRVKLQTADKTILLYSASDIEMLTPEQLTTHPFLQRVGPDVLDPNLTPG

SEQ ID NO: 59452 - protein, 309 aa, Homo sapiens
  DOMAIN (258)..(302): Formamidopyrimidine-DNA glycosylase proteins domain identified by eMATRIX, accession number BL01242G, p-value=8.816e- 16, raw score of 25.36
  DOMAIN (79)..(301): Formamidopyrimidine-DNA glycosylase domain identified by PFam, accession name Fapy_DNA_glyco, E-value=1.6e-18, PFam score of 74.9
MSGQCHTTQGNPYIGVNFGVKTLEEEANTAGVVKDKFYQWNESNDYYVSCDCDKDNVRSGRWAFAADSPLVYLGDNWYKINDYLAAKVLLQVKGSSPTAVPFENVGTGGDTRWHICDPGGQRLGGQGASGNSGSFSLKILQPFVGSVVIPPMALARLYECYNIPAGDSCTTTGEEPRRFVSTSLSPRFRNRQFAGLLLDQAFLAGLGNYLRVEILWQVGLTGNHKAKDLNAAQLDALAHALLEIPRFSYATRGQVDENKHHGALFRFKVFHRDGEPCERCGSIIEKTTLSSRPFYWCPGCQHYADRFGA

SEQ ID NO: 59453 - protein, 371 aa, Homo sapiens
  DOMAIN (126)..(168): p53 tumor antigen proteins domain identified by eMATRIX, accession number BL00348C, p-value=1.000e-40, raw score of 13.25
  DOMAIN (118)..(209): P53 domain identified by PFam, accession name P53, E-value= 7.8e-69, PFam score of 242.1
MCLIFGLGLNNSIGKQGFLGAQGLELGTRIASGVLRQQLDLIATRTGENKWLTREQTSGVQQQIRQALSALPLPVNRLEEFDNCREAWRKYVGFGKTEVAMRAAFLAVDNHKQAYFQKCFGQLAKTCPVQLWVDSTPPPGTRVRAMAIYKQSQHMTEVVRRCPHHERCSDSDGLAPPQHLIRVEGNLRVEYLDDRNTFRHSVVVPYEPPLQETIVKRLQQESWFVGTSNYDLARRLSLTPMGTQAHEWFQIILNCPATWEVLAGLLLDQAFLAGLGNYLRVEILWQVGLTGNHKAKDLNAAQLDALAHALLEIPRFSYATRGQVDENKHHGALFRFKVFHRDGEPCERCGSIIEKTTLSSRPFYWCPGCQH

SEQ ID NO: 59454 - protein, 291 aa, Homo sapiens
  DOMAIN (12)..(26): LEUCINE-RICH REPEAT SIGNATURE domain identified by eMATRIX, accession number PR00019B, p-value=9.000e-11, raw score of 11.36
  DOMAIN (59)..(290): Formamidopyrimidine-DNA glycosylase domain identified by PFam, accession name Fapy_DNA_glyco, E-value=3.3e-37, PFam score of 137.0
MELGTTFNAKNTTKLEYLNLSNNNLLPTNDIDQLISSKHLWHVLVNGINNDPLAQMQYWTAVRNIIDDTNEVTIDLSGLNLTTQPPGLQNFTSINLDNNQFTHFDATNYDRLVKLSLNSNALESINFPQGRNRLDIEMLTPEQLTTHPCVVQRVGPDVLDPNLTPEVVKERLLSPRFRNRQFAGLLLDQAFLAGLGNYLRVEILWQVGLTGNHKAKDLNAAQLDALAHALLEIPRFSYATRGQVDENKHHGALFRFKVFHRDGEPCERCGSIIEKTTLSSRPFYWCPGCQH

SEQ ID NO: 59455 - protein, 150 aa, Homo sapiens
  DOMAIN (101)..(140): Ribosomal protein L17 proteins domain identified by eMATRIX, accession number BL01167B, p-value=5.304e-39, raw score of 20.66
  DOMAIN (43)..(139): Ribosomal protein L17 domain identified by PFam, accession name Ribosomal_L17, E-value=7e-66, PFam score of 232.3
PSLRIQCPYPYIAGTGNTVTEPDLLPLQSGRQLNRNSSHRQAMFRNMAGSLVRHEIIKTTLPKAKELRRVVEPLITLAKTDSVANRRLAFARTRDNEIVAKLFNELGPRFASRAGGYTRILKCGFRAGDNAPMAYIELVDRSEKAEAAAE

SEQ ID NO: 59456 - protein, 174 aa, Homo sapiens
MQTMPNASKDAEQQELSLIAVFLVIKLSQILECGRPETRAGLPIPASQVEVLKNPNGTRLASSSPLNGGKSKWQWVSIKRQIKPLITLAKTDSVANRRLAFARYVGGLYRVIMLILGHSFNCDNSPSLNQLGTRFLRIQHGNFLHAARTISLILRSKMSSQQWKSIEVPQSALL

SEQ ID NO: 59457 - protein, 304 aa, Homo sapiens
MQALWEDIDRLTLPYGDLESDEDPGSKEGKPVITAAVKLCEPKLWRAGNCFSRLAAFNEGRKTPSLSPGTLSDSLEDPLGGSLRQGTLSDSLEDPLRGSLSPGTLSDSLEDPLRGSLSPGTLSDSLEDPLGGSLSPGTLSDSLEDPLHGSLSRGTLSDSLEDPLRGSLSPGTLSDSLEDPLRGSLSPGTLSDSLEDPLRGSFAAAAPGPPHHCRRVILVSHGDSCRFLANHNYLCYLKRTRGRPRQGDPTGIRDGMFFRRIESVAEVKGKLRVLDLKRQDVQDAVATAENAETLFRSGLADDYQ

SEQ ID NO: 59458 - protein, 804 aa, Homo sapiens
  DOMAIN (117)..(165): Sodium:galactoside symporter family proteins domain identified by eMATRIX, accession number BL00872B, p-value=4.296e- 14, raw score of 26.61
  DOMAIN (1)..(57): Protein of unknown function DUF24 domain identified by PFam, accession name DUF24, E-value=3.6e-11, PFam score of 50.5
MLAQSLQALEQDGFLNRIAYPVVPPHVEYSLTPLGEQVSEKVAALADWIELNLPEVLAVRDERTRYDIAVPRKRYGHAVSRNTFALRSQERYGHSVLETVGNSGSSKQFSMDILDPCARGPGQISLITVNHKLHVRCESIAYSVQTMVVKGGSAFAAFFIAVVLWMIGYVPNVEQSTQALLGMQFIMIALPTLFFMVTLILYFRFYRLNGDTLRRIQIHLLDKYRKVPPEPVHADIPVGARLSFAERVMEGLSDGGQSLQSPSALFSKQTLKNMSIYKIPLPLNILEAARERITWTLNTLPRVCVSFSGGKDSGLMLHLTAELARQMGKKICVLFIDWEAQFSCTINYVQSLRELYTDVIEEFYWDALPLTTQNSLSQYQPEWQCWEPDVEWVRQPPQDAITDPDFFCFYQPGMTFEQFVREFAEWFSQKRPAAMMIGIRADESYNRFVAIASLNKQRFADDKPWTTAAPGGHSWYIYPIYDWKVADIWTWYANHQSLCNPLYNLMYQAGVPLRHMRICEPFGPEQRQGLWLYHVIEPDRWAAIGSPADREEDAEEYLEAIMEARVTVAGMGLVMEVQDYFDGEADRLAKAWLPEYTPQIKSLKDERKEAYRQIVEMSTEPQDVDLVRPANKFEMTRVREGEKEADLPVWKHHLLCDESGNYPALLNHWETKVFEIETKREGFAFWYRNPQYTGQSSLGIAYVEAEQYKIVRPDFLFFAEQDGKMVVDLVDPHSLHLADALPKLEGLALYAEHHSDAYRRIESVAEVKGKLRVLDLKRQDVQDAVATAENAETLFSSGLADDYQ

SEQ ID NO: 59459 - protein, 159 aa, Homo sapiens
NKCRGKACWSLPAPASEYSSPTDCAPQVWTVTLSLGIAYVEAEQYKIVRPDFLFFAEQDGKMVVDLVDPHSLHLADALPKLEGLALYAEHHSDAYRRIESVAEVKGKLRVLDLKRQDVQDAVVPSSICYSRSYGLLHQTLCFQLWSGSRDPLARTYPAH

SEQ ID NO: 59460 - protein, 3386 aa, Homo sapiens
  DOMAIN (2438)..(2470): Phosphofructokinase proteins domain identified by eMATRIX, accession number BL00433D, p-value=2.440e-29, raw score of 13.22
  DOMAIN (2345)..(2474): Phosphofructokinase domain identified by PFam, accession name PFK, E-value=1e-97, PFam score of 267.8
MPHPGCKTNGLTTYPNCLRALRKMRIHGPSSPQFSGCQELLTVRKTRSGCGIIMVTRPLSVVTAVIPFGEPFGLAGDFAEVIDIAQCHQPFAFQCRQMRRITHFHAPFTMRDSNRHLRAQHPLQQQRRALGYFNQAETRFKAIGGIAHKTWPQLTTWDQFTQIRHHLATVTYPQRQRLRTVEEGCKLIAYTHITVGETTARDQGVEIFQARASGQQVTHMHVDSIKACTVESCRHFNMRVHALLTQYGNFRTCASGNIRCCHIFVDIERQFYIQARIGVVRFRLMLLIGTLRVVTQALHLPGSFCPPDTQRGAAFAEYSLPVGGNHKTVTGNRLPYIMDTISKPMLCQYGLDRFTVSGTNLNHRTQFFVKQRRQAIVTQSGDIRVNATMTSKGHFRQRYQQAAIRAVVIRQQLTLCNQRLNRVIEAFQLRDIAYICRFVAKLTINLRQRRCAQRVIAFAQINQQQCVSSVESCGVMASAEPEHYEALFVYAQKRLDKCVFGEEKPAYARYRADLTGEKIRPNTSSTSASGWQRFSQVYGAPCATTRSTFSRQSFNALVTAGTTCSGRILENGGNSKGVSNGFVIRAVLVKESLIIESLKEKDKPFLYLDTHAGAGRYQLGSEHAERTGEYLEGIARIWQQDDLPAELEAYINVVKHFNRSGQLRYYPGSPLIARLLLREQDSLQLTELHPSDYPLLRSEFQKDSRARVEKADGFQQLKAKLPPVSRRGLILIDPPYDMKTDYQAVVSGIAEGYKRFATGIYALWYPVVLRQQIKRMIHDLEATGIRKILQIELAVLPDSDRRGMTASGMIVINPPWKLEQQMNNVLPWLHSKLVPAGTGHATLDRAGVIAAIAGTYYVSRYNRGHFVMTKHYDYIAIGGGSGGIASINRAAMYGQKCALIEAKELGGTCVNVGCVPKKVMWHAAQIREAIHMYGPDYGFDTTINKFNWETLIASRTAYIDRIHTSYENVLGKNNVDVIKGFARFVDAKTLECDPFYIFSALLFFIPFALMMAEMGAAYRKEEGGIYSWMNNSVGPRFAFIGTFMWFSSYIIWMVSTSAKVWVPFSTFLYGSDMTQHWRIAGLEPTQVVGLLAVAWMILVTVVASKGINKIARITAVGGIAVMCLNLVLLLVSITILLLNGGHFAQDINFLASPNPGYQSGLAMLSFVVFAIFAYGGIEAVGGLVDKTENPEKNFAKGIVFAAIVISIGYSLAIFLWGVSTNWQQVLSNGSVNLGNITYVLMKSLGMTLGNALHLSPEASLSLGVWFARITGLSMFLAYTGAFFTLCYSPLKAIIQGTPKALWPEPMTRLNAMGMPSIAMWMQCGLVTVFILLVSFGGGTASAFFNKLTLMANVSMTLPYLFLALAFPFFKARQDLDRPFVIFKTHLSAMIATVVVVLVVTFANVFTIIQPVVEAGDWDMVSARYLQHIVVRHFSFQRVRVEIAVRAFLHAPRDVNVETQRSVQQQFQRLTTVGNGALFFAGQFGGGFPFGRYEEDWIITKATSARWFTSNHARPATVAYQRSGIFRVTQIYQHAVETRLTLVVRYVFHCFQQFLQILLIGRVFTGITRGVNARRAAKHIYRQTRVVGNCRTGEGVDVLRNHLKQSMGFDTNMEGGFLARRRHLQALEQAAEHLQQGKAQLLGAWAGELLAEELRLAQQNLSEITGEFTSDDLLGRIFSSFCIEAIIKSGMNPFLLDSEDVFIDLLTDSGTGAVTQSMQAAMMRGDEAYSGSQTNNDNAAHELESQAATSVTNGAHIYPFKTSHIGELATVNPGTDLTVVDASGKQPIVLLQGYQMQGSENTLYLAAGQRLALATLSEEGIKALTVNGEWQADEYGNQWRQASLQGALTDPALADRKPLWQYAEKLDDTYCAGCHAPIAADHYTVNAWPSIAKGMGARTSMSENELDILTRYFQYNAKDITEKHGIAAGALVVTSAAPLPAWAEEKGGKILTAGRWGAMNVEVKDGKIVSSTGALAKTIPNSLQSTAADQVHTTARIQHPMVRKSYLDNPLQPAKGRGEDTYVQVSWEQALKLIHEQHDRIRKANGPSAIFAGSYGWRSSGVLHKAQTLLQRYMNLAGGYSGHSGDYSTGAAQVIMPHVVGSVEVYEQQTSWPLILENSQVVVLWGMNPLNTLKIAWSSTDEQGLEYFHQLKKSGKPVIAIDPIRSETIEFFDDNATWIAPNMGTDVALMLGIAHTLMTQGKHDKVFLEKYTTGYPQFEEYLTGKSDNTPKSAVWAAEITGVPEAQIVKLAELMAANRTMLMAGWGIQRQQYGEQKHAGFIQRPAIRHPYHHVKGAFTEYVRNNRLPETVIRVKQPALARFSPDIAPLFVHFRADDDVTARLYAREAIDRLRDTSSSHQRISVVEVMGRYCGDLTLAAAIAGGCEFVVVPEVEFSREDLVNEIKAGIAKGKKHAIVAITEHMCDVDELAHFIEKETGRETRATVLGHIQRGGSPVPYDRILASRMGAYAIDLLLAGYGGRCVGIQNEQLVHHDIIDAIENMKRPFKEVIKESKVEEPRKRETVSIMLTKYAAYNTFHHCEQCRQYMDFTSASQNELALHSKKEIDEYFAHVWQTMQACIDRGMNTEGVLPGPLRVPRRASALRRMLVSSDKLSNDPMNVIDWVNMFALAVNEENAAGGRVVTAPTNGACGIVPAVLAYYDHFIESNCWAVARNRDVMRDGRIEQDGTPREIYEEPKNLFVAGFIGEINMFNATVIERLDEQRVRANVEGRECNIYVNFAVEPGQKLHVLLRPEDLRVEEINDDNHAEGLIGYVRERNYKGMTLESVVELENGKMVMVSEFFNEDDPDFDHSLDQKMAINWVESWEVVLADEEHKICWTFIRAPMNFHVWFRSQKPGFPMVQQSRIVPAFVTQQMVFPDWKVSFLFTFTHPGHFKLVRRPDQIHILRFGTHFDDLTIGLFTLIFQRLDLRCVLGQPRLRQSIGLAIEVILHLHHQPHASNGNTSLHDCFQIFLCILFSIRNLIGQIFDIAVPPVQLLTGWCVTAKALPDISAISALTAVNMATAVHFTPLLNRNTWIQCGSLGRPMGTLKNPAVEENKKAQLERDKQLSEQQKQAALAKEYKAQVKQLIEMNRITIANGDIGFNFTDGNLIKKIFVDKLTQAQLINGRLAIARLLVDNNSEGEYAIIPASVADKIAQRDASSIVLHSALSAEEQDEDDPYADFKVPDDLMWPTVYGRSVDRIRRSRRIRQSCAMPDAKLCASYQAYGLRAKFYWRGSICCRAVLERNREQPMTRTKELAEVVAAATPVKDKFKHPATRTFQAVRIWVNSELEEIEQALKSSLNVLAPGGRLSIISFHSLEDRIVKRFMRENSRGPQVPAGLPMTEEQLKKLGGRQLRALGKLMPGEEEVAENPRARSSVLRIAERTNA

SEQ ID NO: 59461 - protein, 294 aa, Homo sapiens
MRLQRLRLPLCAACRHIGDVIVYSAYVCEHRCMRLLATRRHYVVTLTTHLRRRLFLTEVNARYVCIYDDEVSVMRLTKSCTTDHVSQSAFALIYHERKEAYRQIVEMSTEPQDVDLVRPANKFEMTRVREGEKEADLPVWKHHLLCDESGNYPALLNHWETKVFEIETKREGFAFWYRNPQYTGQSSLGIAYVEAEQYKIVRPDFLFFAEQDGKMVVDLVDPHSLHLADALPKLEGLALYAEHHSDAYRRIESVAEVKGKLRVLDLKRQDVQDAVATAENAETLFSSGLADDYQ

SEQ ID NO: 59462 - protein, 828 aa, Homo sapiens; identical to SEQ ID NO: 48669
  DOMAIN (634)..(655): RHS PROTEIN SIGNATURE domain identified by eMATRIX, accession number PR00394D, p-value=1.090e-28, raw score of 6.56
  DOMAIN (9)..(199): Deoxyribose-phosphate aldolase domain identified by PFam, accession name DeoC, E-value=3.4e-16, PFam score of 67.2

SEQ ID NO: 59463 - protein, 132 aa, Homo sapiens
ERSLRCWRTRRRNSGVLGGTFLDLLTSLNESNAEFDFFTVSIISTSANSTVSPVAMSAEQAQMIRTAIEQGNGRHLLEPVLEAMNACGSLEWTRQRAEEEADKAIAALQVLPDTPWREALIGLAHIAVQRDR

SEQ ID NO: 59464 - protein, 113 aa, Homo sapiens
  DOMAIN (5)..(88): FGGY family of carbohydrate kinases domain identified by PFam, accession name FGGY, E-value=2.7e-25, PFam score of 97.5
DLQDTGCFMLMNTGEKAVKSENGLLTTIACGPTGEVNYALEGAVFMAGASIQWLRDEMKLINDAYDSEYFATKVQNTNGVYVVPALPGWSLLWTRTCHRIFPRHRISGAAGYK

SEQ ID NO: 59465 - protein, 62 aa, Homo sapiens
  misc_feature (1)...(62): Xaa = X or * as defined in Table 2
QGDIALVIATNQFCIKLAPIIELNTDFLCLINHMVVGQHIAFTGVDDDTGAXTFEGLCRLIR

SEQ ID NO: 59466 - protein, 325 aa, Homo sapiens; identical to SEQ ID NO: 59221
  DOMAIN (258)..(283): kw PERIPLASMIC GALACTOSE RIBOSE XYLOSE domain identified by eMATRIX, accession number DM01011C, p-value=6.040e-20, raw score of 17.35
  DOMAIN (72)..(293): Periplasmic binding proteins and suga domain identified by PFam, accession name Peripla_BP_like, E-value=0.00028, PFam score of -12.7

SEQ ID NO: 59467 - protein, 165 aa, Homo sapiens
  misc_feature (1)...(165): Xaa = X or * as defined in Table 2
DFRWHGDSRKVHRKNRLIKPLMILLTRLSNRTNWPLTAAVIWPGKVXSACRKSANAPKNIRRLCVSGWKSANWMSTQSSSSSSSTSSSIIIIIINSSSSLQCQPCASKYLAHYFTVSSIAAYSTPVVSTQEPWATRHHPHHQQTDRRRPATRKSPRQYHNETNRQ

SEQ ID NO: 59468 - protein, 77 aa, Homo sapiens
  misc_feature (1)...(77): Xaa = X or * as defined in Table 2
PENGRPVYAGGRDAAWRDVYAEFPRLSLPDGFRAAAVHRADAALHHADLXHHEXAPSALGLCLXRLAGGDWCRDYSL

SEQ ID NO: 59469 - protein, 1084 aa, Homo sapiens
  DOMAIN (230)..(255): HTRA/DEGQ PROTEASE FAMILY SIGNATURE domain identified by eMATRIX, accession number PR00834C, p-value=7.652e-23, raw score of 15.43
  DOMAIN (317)..(509): FGGY family of carbohydrate kinases domain identified by PFam, accession name FGGY, E-value=2.8e-92, PFam score of 320.0
MTRIDDYGSVLLLIYADNEKQNFGQLFIAFNKVFCMFYRSHLRDNLAGFLSVNHQLQTRCADIRRVLGNRRGHLSGFHHFAGFRNAICTDDQHFSRFSGLQNKPHPKVIEYPRLGGTEVSGESLAWVDIHDFKPMRKACDKRDQGVANYYPLLGFVHATMSPITASKGYVLTNNHVINQAQKISIQLNDGREFDAKLIGSDDQSDIALLQIQNPSKLTQIAIADSDKLRVGDFAVAVGNPFGLGQTATSGIVSALGRSGLNLEGLENFIQTDASINRGNSGGALLNLNGRIGRRDFWIWIGLWFAGMLVLFSLADPGQLCVKEGMAKNTYGTGCFMLMNTGEKAVKSENGLLTTIACGPTGEVNYALEGAVFMAGASIQWLRDEMKLINDAYDSEYFATKVQNTNGVYVVPAFTGLGAPYWDPYARGAIFGLTRGVNANHIIRATLESIAYQTRDVLEAMQADSGIRLHALRVDGGAVANNFLMQFQSDILGTRVERPGMREVTALGAAYLAGLGGGFWQNLDELQEKAVIEREFRPGIETTEQFAMRRELAIEFSRVTESAALAGYKWLGRGDKNTADGAAVNAMRIMLNQVNIDGTIVIGEGEIDEAPMLYIGEKVGTGRGDAVDIAVDPIEGTRMTAMGQANALAVLAVGDKGCFLNAPDMYMEKLIVGPGAKGTIDLNLPLADNLRNVAAALGKPLSELTVHEKQPSRYRADDGKVEGPKLSGLNLWLNASLRLHTRPINVVVSLILRRCPLCGDSRLDFSAALCRPLWLLVGGIGPAVAHNRNRKYGEILVLGGARRQEKDFLRQAGLEVLVRTLLPKALESLWIQLHLPDPVTPGARQSHICDRYRADLVVFVFGSGGAGARCVCRALRHGQYTVVYGDPYRCLDSVPETVLNLPDIPGGKKLIYNGVTMPLTAIADFAEKGKTDPLFKELARLAALAAWPQTGCGDKNKIDGLAVTAMRQALNDVAFRGRVVIGEGEIDHAPMLWIGEEVGKGDGPEVDIAVDPIEGTRMVAMGQSNALAVMAFAPRDSLLHAPDMYMKKLVVNRLAAGAIDLSLPLTDNLRNVAKALGKPLDKLRM

SEQ ID NO: 59470 - protein, 919 aa, Homo sapiens
  DOMAIN (127)..(140): Hexapeptide-repeat containing-transferases proteins domain identified by eMATRIX, accession number BL00101B, p-value=1.000e- 13, raw score of 8.91
  DOMAIN (598)..(756): SIS domain identified by PFam, accession name SIS, E-value= 3.3e-44, PFam score of 160.3
MAAKGRWMPMVAATGGNIVTLEVCGPMGEKVNAFYGLTGDGKTAVIEMAAASGLMLVAPEKRNPLLASSFGTGELIRHALDNDIRHIILGIGGSATVDGGMGMAQALGVRFLDADGQALAANGGVTIGDNSVIGAGSIVTKDIPPNVVAAGVPCRVIREINDRDKHYYFKDYKVESPTSSAIYISRIRHEQSAGTSVASCLFDPQLRKTYWCKTQGYDHQPNDAQRMKCPVHQVIAADTTQHARKPRGKPGDDKTDSLHKRHQLASNSRLHRVIERQIKHHRSPMELMTMLRDVRLNGLPLIDIRVPAAASTARSTIPLRPPTSAPAVPARKGNGSSRALVASGNSIPAPKKNSAAGTSSVQTFITPNQSGIHISKPASRQQITDCHINHAGAGFKGGNPGQTANQHQQITVKTAVTDSRDPRYRDNTHAQRSSRKKSPLPWSTTAFRMCRPFMGLKARARALAGRTGCGVCGVEQLNDIGKPVQPLPFTQTSDLNKLDDALRHLNDFQPVGQLTGCTHAAAWMLPSGELVGGHEDVGRHVALDKLLGRRSQEGESWQQGLRLACKKELKLAPLKASKLKFAAEALPDAISRAAMTLVQSLLNGNKILCCGNGTSAANAQHFAASMINRFETERPSLPAIALNTDNVVLTAIANDRLHDEVYAKQVRALGHAGDVLLAISTRGNSRDIVKAVEAAITRDMTIVALTGYDGGELAGLLGPQDVEIRIPSHRSARIQEMHMLTVNCLCDLIDNTLLTLDIPDTEPDPPIQHCCGSTGNLGLSIGIMSARIGFKVTVHMSADARAWKKAKLRSHGVTVVEYEQDYGVAVEEGRKAAQSDPNCFFIDDENSRTLFLGYSVLASVLKRNLPSKAVSSMLITLCLSICRVVLAVVLVASHSGLNWRLAIMFTAFLPNQRTPLVCC

SEQ ID NO: 59471 - protein, 241 aa, Homo sapiens
  DOMAIN (138)..(226): Uncharacterised protein family UPF0102 domain identified by PFam, accession name UPF0102, E-value=1.3e-41, PFam score of 151.7
MLLIFPKKTHKALEAKNFRAAIEYGKQDFEVEDVRLDFKKHMSMSYKGSVYRTQDPGGVGSGGDLLIHWFQRSVGEVWFPRQGSLSGRPAGQQVDDGRQCLFAGKSFLTNAQVQGFEITGNTGSLTANPDCVINRNLSWLQYNRGLRFIAANVNERGGEIDLIMREGRTTIFVEVRYRRSALYGGAAASVTRSKQHKLLQTARLWLARHNGSFDTVDCRFDVVAFTGNEVEWIKDAFNDHS

SEQ ID NO: 59472 - protein, 108 aa, Homo sapiens
FMSMYTTAQLLAANEQKFKFDPLFLRLFFRESYPFTTEKVYLSQIPGLVNMALYVSPIVSGEVIRSRGGSTSEFTPGYVKPKHEVNPQMTLRRLPDEDPQNLADPAYR

SEQ ID NO: 59473 - protein, 401 aa, Homo sapiens; identical to SEQ ID NO: 43518
  misc_feature (1)...(401): Xaa = X or * as defined in Table 2

SEQ ID NO: 59474 - protein, 621 aa, Homo sapiens
  DOMAIN (243)..(262): Electron transfer flavoprotein alpha-subunit proteins domain identified by eMATRIX, accession number BL00696A, p-value=5.034e- 14, raw score of 12.15
  DOMAIN (81)..(287): Electron transfer flavoprotein alpha subuni domain identified by PFam, accession name ETF_alpha, E-value=1.5e-30, PFam score of 114.9
MEVDITHKFVYIVLIFNHENSSASSSSPSMKAILGAAKKPVQVWSAADIGFNAEAAWSEQQVAAPKQRERQRIVIEGDGEEQIAAFAENLRKALANQINTFVLNDADGAQAIQLGANHVWKLNGKPDDRMIEDYAGVMADTIRQHGAYGLVLLPNTPAVSNDASTVSVQAGKATVKHMVYGGLAIGEERIATRYAVLTISSGTFDAAQPDASRTGETHTVEWQAPAVAITRTATQARQSNSVDLDKARMVVSVGRGIGSKENIALAEQLCKAIDFFTLIFARKPGAGPPIRRRFLKPLMGGYMMGRLMGGGAGFAQQPLFFFKKPASPAYGKYTDATGKNYGAAQPGRTMTVPKTGMGPKPATTTTVTRGGVSITERPDWREKAHEYGFNFHTMYGEPYWCEDAYYKLTLAQVEKLEEVTAELHQMCLKVVEKVIASDELMTKFRIPKHTWSFVRQSWLTHQPSLYSRLDLAWDGTGEPKLLENNADTPTSLYEAAFFQWIWLEDQLNAGNLPEGSDQFNSLQEKLIDRFVELREQYGFQLLHLTCCRDTVEDRGTIQYLQDCATEAEFQTMQRRGQVEQERHQWESCWGNGQRVHQEAGPPLPLLAHGKLEFMLSIAPAI

SEQ ID NO: 59475 - protein, 562 aa, Homo sapiens
  DOMAIN (248)..(278): BACTERIAL CHEMOTAXIS SENSORY TRANSDUCER SIGNATURE domain identified by eMATRIX, accession number PR00260G, p-value=3.104e- 19, raw score of 4.71
  DOMAIN (310)..(560): CheR methyltransferase domain identified by PFam, accession name CheR, E-value=6.4e-118, PFam score of 405.2
RDVALVVTWGPGRDVDVTDWLVTIPRQIIDANKRDGWCVSHDWRTKLQGVFWNAEFGHQLIAGDHFFHHFQAHLVQFGGDFFQLFNLGEGQLVVSIFTPVRLAVHGVKIETVFVGFLTPVRALGNTDGCTTLHSALFGNRFTKTATGNGSGGRRFWCHCRLRYGHGAAWLGCAIVFTRRVGIFTVSRTGWVFRGEQRLLCKSRAAAHQTPHHVTGHQRHPETPAGLLGLRLVFWCHASLGWCLLALTFTKFSNTVLPDIMGEIASASEEQQRGIEQVAQAVSQMDQVTQQNASLVEEAAVATEQLANQADHLSSRVAVFTHKRDMVYNRLVRRLRSLGLTDFGHYLNLLESNQHSGEWQAFINSLTTNLTAFFREAHHFPLLADHARRRSGEYRVWSAAASTGEEPYSIAMTLADTLGTAPGRWKVFASDIDTEVLEKARSGIYRHEELKNLTPQQLQRYFMRGTGPHEGLVRVRQELANYVDFAPLNLLAKQYTVPGPFDAIFCRNVMIYFDQTTQQEILRRFVPLLKPDGLLFAGHSENFSHLERRFTLRGQTVYALSKD

SEQ ID NO: 59476 - protein, 382 aa, Homo sapiens
  misc_feature (1)...(382): Xaa = X or * as defined in Table 2
MKSVRYLIGLFAFIACYYLLPISTRLLWQPDETRYAEISREMLASGDWIVPHLLGLRYFEKPIAGYWINSIGQWLFGANNFGVRAGVIFATLLTAALVTWFTLRLWRDKRLALLATVIYLSLFIVYAIGTYAVLDPFIAFWLVAGMCSFWLAMQAQTWKGKSAGFLLLGITCGMGVMTKGFLALAVPVLSVLPWVATQKRWKDLFIYGWLAVIKCVLTVLPWGLAIRRGYSRRSTFAAVKCGLAQLYGDPPAWPTPTRGVSEIRLALRFKSNDSLLRHFKDTSTLYLEIVDYPGEWLLDLPMLAQDYLSWSRQMTGLLNGQRGEWSAKWRMMSEGLDPLAPADENRLADIAAAWTDYLHHCKEQGLHFIQPGRFVLPGDMAX

SEQ ID NO: 59477 - protein, 241 aa, Homo sapiens
  misc_feature (1)...(241): Xaa = X or * as defined in Table 2
LAQLYGDPPAWPTPTRGVSEIRLALRFKSNDSLLRHFKDTSTLYLEIVDYPGEWLLDLPMLAQDYLSWSRQMTGLLNGQRGEWSAKWRMMSEGLDPLAPADENRLADIAAAWTDYLHHCKEQGLHFIQPGRFVLPGDMAGAPALQFFPWPDVDTWGESKLAQADKHTNAGMLRERFNYYCEKIVLVDCLQPLNSGHSIYDMRWPDALIKFSYGQRTVQRCFITPRAQSAXSGTTSGDLTRR

SEQ ID NO: 59478 - protein, 621 aa, Homo sapiens
MDDLALRRFPGSKICGTDTPKNITNHMPFLMITIVVRYGQPPYYRSKVLQPWPRISAPYDQHSETTAADVLRHINHPFALTLLIRVAGQTKRCHDRMTKAIAAFPHAAMAALTELLGQKEENSWRIMLMTMLISQPALAEQSTSTTQILALSWTRQTIQYINLLAKYIWYSKHITVSHEESTTNLLARMGFQRRIAGLPGLVNSLARYPQEALPITNYFAASELAPAVARAFNKLKTLRENARSWLLKYPEHALTGLLPAALGKAGEAQDNARAALRMLTENGHQPLLQEIARRYNQPEVTDADYLSWSRQMTRLLNGQRGEWSAKWRMMSEGLDPLAPADENRLADIAAAWTDYLHHCKEQGLHFIQPGRFVLPGDMAGAPALQFFPWPDVDTWGESKLAQADKHTNAGMLRERFNYYCEKVVKGFYKNHFLRFDRQIVLVDCLQPLNSGPQAFNDMRLALTQLMQSFHYGQRTLFRRLFSPVIDKLLFAATKADHVTIDQHANMVSLLQQLIQDAWQNAAFEGISMDCLGLASVQATTSGIIDVNGEKIPALRGNRLSDGAPLTVYPGEVPARLPGQAFWDKQGFQFEAFRPQVMDVDKPLPHIRLDAALEFLIGDKLR

SEQ ID NO: 59479 - protein, 270 aa, Homo sapiens
  DOMAIN (41)..(68): PROTEIN TRANSMEMBRANE TRANSPORT INNER MEMBRANE R domain identified by eMATRIX, accession number PD01612B, p-value=9.753e- 10, raw score of 11.68
MKPHWEISQQGLTLASPLPNGARRSTKLPWRRLLFPLPYRRRRPFTMTRVNIIKGLGPVRKSRKAGAWNCRRMCMTPQQTHQLNLANHLVCTRLTGKGPFTDVYSVMATGALTMGEIRLAYVLNRMIRCYATLRIPHAVSGNCGLSRRMVARLPMLAQDYLSWSRQMTGYSMVSAENGDGVDKPLPHIRLDAALEVSRKPERPPRYGKPAISPDAVGRIHSIARLATTRLGQLIEPRAKGLAATPEFGALFPNPRLAAMPRDKLAELEPR

SEQ ID NO: 59480 - protein, 182 aa, Homo sapiens
SIQNKCCLAQYQWSSEQHRTAMKRLKNELNALVNRGVDRHLRLAVTGLSRSGKTAFITAMVNQLLNIHAGARLPLLSAPTRGVSEIRLALRFKSNDSLLRHFKDTSTLYLEIVDYPGEWLLELPMLAQDYLSWSRQMTGLLNGQRGEWSAKWRMMSEGLDPLAPADDYPVWRTVAARRGILS

SEQ ID NO: 59481 - protein, 896 aa, Homo sapiens; identical to SEQ ID NO: 54658
  DOMAIN (115)..(162): Acylphosphatase proteins domain identified by eMATRIX, accession number BL00150, p-value=6.906e-34, raw score of 25.33
  DOMAIN (112)..(197): Acylphosphatase domain identified by PFam, accession name Acylphosphatase, E-value=2.8e-05, PFam score of 19.0

SEQ ID NO: 59482 - protein, 404 aa, Homo sapiens
  DOMAIN (325)..(400): Transposase domain identified by PFam, accession name Transposase_8, E-value=4.7e-06, PFam score of 33.6
MVNQLLNIHAGARMPLLSARDFGIPRFTYDEGLAQLYGDPPAWPTPTRGVSEIRLALRFKSNDSLLRHFKDTSTLYLEIVDYPGEWLLDLPMLAQDYLSWSRQMTGLLNGQRGEWSAKWRMMSEGLDPLAPADENRLADIAAAWTDYLHHCKEQGLHFIQPGRFVLPGDMAGAPALQFFPWPDVDTWGESKLAQADKHTNAGMLRERFNYYCEKVVKGFYKNHFLRFDRQIVLVDCLQPLNSGPQAFNDMRLALTQLMQSFHYGQRTLFRRLFSPVIDKLLFAATKADHVTIDQHANMVSLLQQLIQDAWQNAAFEGISMDCLGLAEALKLAERIGVTAAARELSLYESQLYNWRSKQQNQQTSSERELEMSTEIARLKRQLAERDEELAILQKAATYFAKRLK

SEQ ID NO: 59483 - protein, 776 aa, Homo sapiens
  DOMAIN (19)..(53): Bacterial regulatory proteins lysR family proteins. domain identified by eMATRIX, accession number BL00044, p-value=3.739e-16, raw score of 19.03
  DOMAIN (5)..(97): Bacterial regulatory helix-turn-helix protei domain identified by PFam, accession name HTH_1, E-value=1.5e-25, PFam score of 98.3
MRMNMSDFATFFAVARNQSFRAAGDELGLSSSAISHSINTLEQRLKIRLFNRTTRSVSLTEAGSNLYERLRPAFDEIQIMLDEMNDFRLTPTGTLKINAARVAAQQHRTAMKRLKNELNALVNRGVDRHLRLAVTGLSRSGKTAFITAMVNQLLNIHAGARLPLLSAVREERLLGVKRIPQRDFGIPRFTYDEGLAQLYGDPPAWPTPTRGVSEIRLALRFKSNDSLLRHFKDTSTLYLEIVDYPGEWLLDLPMLAQDYLSWSRQMTGLLNGQRGEWSAKWRMMSEGLDPLAPADENRLADIAAAWTDYLHHCKEQGLHFIQPGRFVLPGDMAGAPALQFFPWPDVDTWGESKLAQADKHTNAGMLRERFNYYCEKVVKGFYKNHFLRFDRQIVLVDCLQPLNIINCGLLLVIVSLLLRGDPNSSVVFAKASSNATSARHLRDTVTMPTNHAVTVFPLTGPDNIVFVSGTVGPPLCCCVFPSAASALPLALGSRSAALSYCATLRLLPGLGCPTVPAVPPLRVRGGPARPALWSCAFTFLRFVHLLASSPSMLSTPRRSLVVWTFAVALLGASLAERGKAKSKTYKKMKGCLQMFVEVWFGATLVQGERQRQSGTGEKNYSRKPKIREVSPGHHQFVDSPTPYWLLTFVVEPCSVTIEDDPRPEEIQKEREEYTERREGEKPRRKSEKAEREKKETKNRDEQTRKERQKETEERRKKKHEERRKEKEERKTKNEERQGRERRKKEQRKKERQKKRKQQQNVQNQEREEKKSKRERK

SEQ ID NO: 59484 - protein, 177 aa, Homo sapiens
MKHKQNYAGRQKRDTIEDYPTKDDFMTIWVDADACPNVIKEILYRAAERMQMPLVLVANQSLRVPPSRFIRTLRVAAGFDVADNEIVRQCEAGDLVITADIPLAAEAIEKGAAALNPRGERYTPATIRERLTMRDFMDTLRASGIQTGGPDSLSQRDRQAFAAELEKWWLEVQRSRG

SEQ ID NO: 59485 - protein, 57 aa, Homo sapiens
GNLRLPLLVSRNVKLGCTLWSKSWGTVLATGSPGIMHRQPVGKTFQQEPWGGWSTGV

SEQ ID NO: 59486 - protein, 56 aa, Homo sapiens
  misc_feature (1)...(56): Xaa = X or * as defined in Table 2
LLVVQFFFQHLXVPSGTSPXLXHLSGILWHFLLQALLYPRVFLVLLCRSLGAVCLY

SEQ ID NO: 59487 - protein, 682 aa, Homo sapiens
GPCVHDEDSGLSLIGKPALQALLYHCHFYEHLNQMVKHCYLGRCMFDLNFSAFDRNSESNDLNANSSSFTWDGAAEVSLAEVPAGTQGDQGERSKPLLANKASQLSQEGIDTLEQISNFRAWTRKEQDEPGTSCCARNIADATLIQTCVQELRALLPSSPPAEHTQAQVSFLLEYLSSLSRLLQSCLLVEPDLVIQDELVKPLITNIIGILTICTKDVLDKELISAFYHTWTHLFNLLAMLLRKAGAITLPFVTVALAKHWTAAIGLSATCPALYTASLQFLSVLLTEEAKGHLQAKSKTHLCCSPTVASLLDDSQENQKSLEQLSDVILQCYEGKSSKDILKRVAANALMSLLAVSRRAQKHALKALPKGGNKHLSNLTILWLKLLLNISSGEDGQQMILRLDGCLDLLTEMSKYKHKSSPLLPLLIFHNVCFSPANKPKILANALHPRDETDLILVNKLFDVLLDSVCQYFIEDFCIDVHRGYWPEISFFCLWELAGGPLLPLFAWVSPAEATEEQRLLPAPSSGSFIPEGTPQMPARALLYDVSVNTCWELEHPRSTSDCCAGSENFKPVDLSLLGSMGMGSVELGHLAPWLQPPFQGTEQLCLTGIPGTTEPRRTADLGERRGAMALGELAFASLGVQECEARVHAVVQILGDSPCNWVSWDYAPSASGEDVSAGALR

SEQ ID NO: 59488 - protein, 216 aa, Homo sapiens
ASADAWVASQMPLENTTVQQMVFMLLSNLALSHDCKGVIQKSNFLQNFLSLALPKGGNKHLSNLTILWLKLLLNISSGEDGQQMILRLDGCLDLLTEMSKYKHKSSPLLPLLIFHNVCFSPANKPKILANEKVITVLAACLESENQNAQRIGAAALWALIYNYQKAKTALKSPSVKRRVDEAYSLAKKTFPNSEANPLNAYYLKCLENLVQLLNSS

SEQ ID NO: 59489 - protein, 60 aa, Homo sapiens
LLKNICSFLEKVITVLAACLESENQNAQRIGAAALWALIYNYQKVSFKNHCYTWGANNKV

SEQ ID NO: 59490 - protein, 405 aa, Homo sapiens
MGNLQESDNLDRSDTSDLGWKKCYEGKSSKDILKRVAANALMSLLAVSRRAQKHALKALPKGGNKHLSNLTILWLKLLLNISSGEDGQQMILRLDGCLDLLTEMSKYKHKSSPLLPLLIFHNVCFSPANKPKILANALHPRDETDLILVNKLFDVLLDSVCQYFIEDFCIDVHRGYWPEISFFCLWELAGGPLLPLFAWVSPAEATEEQRLLPAPSSGSFIPEGTPQMPARALLYDVSVNTCWEVSPKKVITVLAACLESENQNAQRIGAAALWALIYNYQKPRRTADLGERRGAMALGELAFASLGVQECEARVHAVVQILGDSPCNWVSWDYAPSASGEDVSAGALSLWGCTLCIPHFLRLPEPQVCFLTRDVPRICQSDGKLPHGHQEGERLEKDFLSCVSL

SEQ ID NO: 59491 - protein, 42 aa, Homo sapiens
KDCCLFLPLEASSQRGTHQMPARALLYEVSVDPCWGVSPRQE

SEQ ID NO: 59492 - protein, 72 aa, Homo sapiens
  misc_feature (1)...(72): Xaa = X or * as defined in Table 2
VYRSSVYRDSGCLSGGDLRSGNASGHAKRQSDGDLRSRAATGGDHSAGDWCGRRVQTSAGXLWRKARPWPNR

SEQ ID NO: 59493 - protein, 135 aa, Homo sapiens
  misc_feature (1)...(135): Xaa = X or * as defined in Table 2
SQAYHQVLPVCEAAPIPDDNHTLAALRXHGVYEKHMDQDCWASFLPEERLFWRPIPAPRSDRVECVDSLPLTAVGKVDKKQLRQWLASRASARAQRRSPLAEARKPQYVHQGMDNARTALQKPEQARAHTEVHWT

SEQ ID NO: 59494 - protein, 263 aa, Homo sapiens
FLQRFVADLPCGAQVVKFSTFRTQCRQTEATLKVLFLHGTFNVVTSIGATTQVTNDARTDLRKQLVIDILFGIRRQTLLHFLDRHNRHFCRCRSRNTFLFQLLRMIRDFNDFELVNPLSLDSVLGMQPLREEIQQADRDDDKHHQGAGLLELETANRFPQGDADPACADHADDGRRADVGFEAIEGVGDQQWHHLWQHAVEDLFELVGTGGANAGPGSIASTASESSLESTPVVWINSASTPARQRTGRGRRRPRTAWRRPFR

SEQ ID NO: 59495 - protein, 819 aa, Homo sapiens
MDALLKAGTLRLSLTFNPAHAQQKIASGDLPASSYSFGFREGMIGNVHFVTIPANANASAAAKVVANFLLSPDAQLRKADPAVWGDPSVLDPQKLPDGQRESLQSRMPQDLPPVLAEPHAGWVNALEQEWLHRYALTLISPALSLTHWQALFADPQLPQALLATLVSTNIAAVGALLIALLVIVGAVGRGRIGAVFWPRLPGFVPIPPLEDAIEQIVSYLKHAAQALEEKKQILYLLGPVGGGKSSLAERLKSLMQLVPIYVLSANGERSPVNDHPFCLFNPQEDAQILEKEYGIPRRYLGTIMSPWAAKRLHEFGGDITKFRVVKVWPSILQQIAIAKTEPGDENNQDISALVGKVDIRKLEHYAQNDPDAYGYSGALCRANQGIMEFVEMFKAPIKVLHPLLTATQEGNYNGTEGISALPFNGIILAHSNESEWVTFRNNKNNETFLDRVYIVKPTLEDPPCKACSTQCPIKIDVPEFRSRFLQLYHTRYLRPLRDHLVATVESYAPLMARAPKTFNFFINQPLVRKLSEKHIGMVDLPLLSVPSLQQQMVGHRSANMTLEQLESLNAEQKARTVLVVQDPFTSYYDAQVVADFVRLVEKLGFQPVLLPFSPNGKAQHIKGFLNRFAKTAKKTADFLNRMAKLGMPMVGVDQISMPRLSDKVLTQPLREEIQQADRDDDKHHQGAGLLELETANRFPQGDADPACADHADDGRRADVGFEAIEGVGDQQWHHLWQHAVEDLFELVGTGGANAFHRAGLNRFHRFGKQLGEHAGGVDKQRQHASTPANGPRPTATTNSMAKTISLMARQASIRRRTGW

SEQ ID NO: 59496 - protein, 97 aa, Homo sapiens
ARHLVRLMPVLRLRDARFMRRIRNGTVPNVPNVEVTARHSISSPIRQGLSAMVQLLEHYFSEQGAGQARYRLMRRRASNEQRSWRYLDIINRMIDRP

SEQ ID NO: 59497 - protein, 146 aa, Homo sapiens
IRQGLSAMVQLLEHYFSEQGAGQARYRLMRRRASNEQRSWRYLDIINRMIDRPVAWHLLNLLPLQRIATTNSGELLSLTPVEHVCRLVRESSRVAAWRLGPSGLSTEDSRRISFHIRFNRPSSLFARCWLLVEGETETWVINELAR

SEQ ID NO: 59498 - protein, 90 aa, Homo sapiens
  misc_feature (1)...(90): Xaa = X or * as defined in Table 2
RTSAEPINPAPPVIRIFLISARLCXWTLSPLITLNXLXSTSITSTSAVASASSSCARVQSPVSFFGNWWMLGSTTRVSPLCHWAISSADF

SEQ ID NO: 59499 - protein, 232 aa, Homo sapiens
  misc_feature (1)...(232): Xaa = X or * as defined in Table 2
VPAGRYTGRDLHLHIILPFRESLPARHRVRRYRPLEACXTPCTDGYHRIFYRLKGESAKDGSVMTLRSFLDKDGHPIDVEDINDQARHLVRLMPVLRLRDARFMRRIRNGTVPNVPNVEVTARQLDFLARELSSHPQNLSDGQIRQGLSAMVQLLEHYFSEQGAGQARYRLMRRRASNEQRSWRYLDIINRMIDRPGGRSYRVILLGLFATLLQAKGTLRLDKDARPLLLIE

SEQ ID NO: 59500 - protein, 467 aa, Homo sapiens
  DOMAIN (53)..(99): KDPG and KHG aldolases proteins domain identified by eMATRIX, accession number BL00159A, p-value=9.783e-14, raw score of 21.62
  DOMAIN (3)..(188): KDPG and KHG aldolase domain identified by PFam, accession name Aldolase, E-value=3.5e-09, PFam score of 14.0
ASLMQWQTKLPLIAILRGITPDEALAHVGAVIDAGFDAVEIPLNSPQWEQSIPAIVDAYGDKALIGAGTVLKPEQVDALARMGCQLIVTPNIHSEVIRRAVGYGMTVCPGCATATEAFTALEAGAQALKIFPSSAFGPQYIKALKAVLPSDIAVFAVGGVTPENLAQWIDAVPNVEVTARQLDFLARELSSHPQNLSDGQIRQGLSAMVQLLEHYFSEQGAGQARYRLMRRRASNEQRSWRYLDIINRMIDRPGGRSYRVILLGLFATLLQAKGTLRLDKDARPLLLIEDPETRLHPIMLSVAWHLLNLLPLQRIATTNSGELLSLTPVEHVCRLVRESSRVAAWRLGPSGLSTEDSRRISFHIRFNRPSSLFARCWLLVEGETETWVINELARQCGHHFDAEGIKVIEFAQSGLKPLVKFARRMLHPAYGRKKYKVLPAVLRILVSFKHIGAQSLSFNFLGQPEGS

SEQ ID NO: 59501 - protein, 69 aa, Homo sapiens
  misc_feature (1)...(69): Xaa = X or * as defined in Table 2
LRPALYQPARLSDAAVRKTGXFAVVSGSEHAESDAGXSGELLEQLSEVLRXPDEIFLWRCRAEREQLGL

SEQ ID NO: 59502 - protein, 136 aa, Homo sapiens
FFIFRQRIPVSPRRFKQCISPDNVGFNKRCRAVNRTVNMAFGCQMHDTVWLMLSEYACQFCPIADINFLKGKALALRDRCQRHQVSGVGQLIDHYHRVARFVDDITHQRRANKPGTTCYQNFSHQRQTPLASTTYC

SEQ ID NO: 59503 - protein, 258 aa, Homo sapiens
  misc_feature (1)...(258): Xaa = X or * as defined in Table 2
MELAALRSENPQPDEKPLGETLKDLFSRPVLPEMTDVHLPLNLNIEEFMGEQLHVTGDTDIYREHHAAEMSNIDGNTKLDALDIDSSQGIVDASGTAHLSDNWPVDITLNSTLIVEPLKGDKVKLKMGGALREQLEIGVNLSGPVDMDLRAHTRLAEAGLSLNVEVNSKQLYCLAHCMSSMPKESGADEKNSDNRWCRVYWLGAGALYHQRNERRGGSGRXADLRRKPDVAGTGRAKRALCLXESXYLRSGRTGTRIH

SEQ ID NO: 59504 - protein, 47 aa, Homo sapiens
  misc_feature (1)...(47): Xaa = X or * as defined in Table 2
HRRHPIPFLIHHRDQPFRHQLRKSFPXRPNAKCITRCQQTHSXFFIR

SEQ ID NO: 59505 - protein, 153 aa, Homo sapiens
RLPPAVDPTARLRRPASGRRYPCIPAFVGTPAVSLLCWPTGADDSYCRKSLFRRWRGIRAAGKAAFRGWSGLDRQANPAQVEIIEIRQLVRKSPQTAHSPARIWRRLRSASSRTYARRCCRFQCSKGPADGFPSVGSGKYQRSRRARRPASAG

SEQ ID NO: 59506 - protein, 140 aa, Homo sapiens
  misc_feature (1)...(140): Xaa = X or * as defined in Table 2
RRRHSCNSPTDEGASHTWTQTLSLSDKCRQGTVSGRLSLRKSDCTPISHASCSSSSLHGHXVSVAVRLRMTDFSRTVGKDVQRFDAGLGWTLERLLSAHAAFRVALKAGDMAILASRPPTVTPNSMRLLGRLYRSGVYGR

SEQ ID NO: 59507 - protein, 699 aa, Homo sapiens
  DOMAIN (562)..(604): OXIDASE BIOSYNTHESIS OXIDOREDUCTASE PORP domain identified by eMATRIX, accession number PD01498E, p-value=2.957e-38, raw score of 28.72
  misc_feature (1)...(699): Xaa = X or * as defined in Table 2
STLAQQWQAGDSIWSRPAIRVFATYAKWDEKWGYDYTGNADNNANFGKAVPADFNGGSFGRGDSDEWTFGAQMEIWCSYLLALRQCQADIHSAGCICHGVVLVNDQCLPPVKCWGRCGAKSPFCAITFRVRWTIRKSTKCCANRAYKRNITVGRIRRLRRIRQPLPDATLCVLSGLQTEHNRRWPNSVCHFSPDSTFYNDLSGRMKNVRLMFNGIHRDNGFSKRPTDLNYTRKPLVLAFQTAWFITVRVEIVGFRGINRLSLMLEQNNVLIGENAWGKSSLLDALTLLLSPESDLYHFERDDFWFPPGDINGREHHLHIILTFRESLPGRHRVRRYRPLEACWTPCTDGYHRIFYRLEGESAEDGSVMTLRSFLDKDGHPIECRGIXPIKARHLVRLMPVLRLRECPVLMRRIRNGTVPNVPNVEVTARQLDFLARGGQARYRLMRRRASNEQRSWRYLDIINRMIERPETRYTREIGFTSTNIDLIYGLPKQTPESFAFTLKRVAELNPDRLSVFNYAHLPTIFAAQRKIKDADLPSPQQKLDILQETIAFLTQSGYQFIGMDHFARPDDELAVAQREGVLHRNFQGYTTQGDTDLLGMGVSAISMIGDCYAQNQKELKQYYQQVDEQGNALWRGIALTRDDCIRRDVIKSLICNFRLDYAPIKKQGDLHFADYFAEDLKLLAPLAKDGLGDVDEKEY

SEQ ID NO: 59508 - protein, 746 aa, Homo sapiens
  DOMAIN (646)..(682): Respiratory-chain NADH dehydrogenase 51 Kd subunit proteins domain identified by eMATRIX, accession number BL00644D, p-value= 4.000e-39, raw score of 15.89
  DOMAIN (515)..(742): Respiratory-chain NADH dehydrogenase 51 domain identified by PFam, accession name Complex1_51K, E-value=4.2e-37, PFam score of 136.7
MLTGYRAVSRHKSQRYTADDAEEMIGKLTGMPIPLNSLRQWILGLPGDATDYKLDDQYRLSEITYSQNGKNWKVVYGGYDTKTQPAMPANMELTDGGQRIKLKMDNWIRADGYHTLQTLFQFLDYGDTISIELRDDGDIRLLTPVEGVEHEDNLIVRAARLLMKTAADSGLSSDGKRRSSSCARVQSPVSFFGNWWMLGQTTRVSPLCHWAISSAISHRRAFAQVINIRFKRQTKAGDFQFTGAFIGSRQAISHRRFHLIDNPERFVIVHFARGTDKPRLLGVLCHDKPRINSNAVTAHARARLKNINARVTIRQANQFPDVNPLIGTNQRHFISKSDIHIAEAVFEPSIIAADRLNPLVNELIIMPDIEKRLDAFVRIAHEELLYLLGILMNPANKDHVLPLILTGPKESADYFRVLDEFVVHTLGENARRHYRIIIDDAAEVARQMKKSMPLVKENRRDTGDAYSFNWSMRIAPDLQMPFEPSHENMANLKLYPDQPVEVLAADLRRAFSGIVAGNVKEVGIRAIEEFGPYKINGDKEIMRRMDDLLQGFVAQHPGSYNDLLLMELLPHLLVEGMLISAVSAESLPWLHLSCVANISKRQLICAVPLPKPPKAGLLGKNIMGTGFDFELFVHTGAGRYICGEETALINSLEGRRANPRSKPPFPATSGAWGKPTCVNNVETLCNVPAILANGVEWYQNISKSKDAGTKLMGFSGRVKNPGLWELRSATPHARSSKITPVVCVMV

SEQ ID NO: 59509 - protein, 964 aa, Homo sapiens
  DOMAIN (667)..(699): ABC transporters family proteins domain identified by eMATRIX, accession number BL00211B, p-value=8.500e-18, raw score of 13.37
  DOMAIN (73)..(353): NAD dependent epimerase/dehydratase family domain identified by PFam, accession name Epimerase, E-value=3e-77, PFam score of 270.1
MEDRKCESLAGMYENYLAETRKRQTGASGMYVGEFENSWCFFQALSALTAATSALPPPARLQRDPRRKVELKAAMKNYLVQNVSSAEVEKPYLEQTPDCCLQTTMEFWTSFTESSLCCTGLIDNLSELSLTEVTLLEAARAFCNALTEDKKSAFRFHHISTDEVYGDLHSTDDFFTETTPYAPSSPYSASKASSDHLVRAWLRTYGLPTLITNCSNNYGPYHFPEKLIPLMILNALAGKSLPVYGNGQQIRDWLYVEDHARALYCVATTGKVGETYNIGGHNERKNLDVVETICELLEELAPNKPHGVAHYRDLITFVADRPGHDPSSCHIMPGSNDFGDGTRLCDRFPLHLGSVSARSRRSQGREDALLPAASGWQGLRRKAREGDALHCCRGVESDLYHFERDDFWFPPGDINGREHHLHIILTFRESLPGRHRVRRYRPLEACWTPCTDGYHRIFYRLEGESAEDGSVMTLRSFLDKDGHPIDVEDINDQARHLVRLMPVLRLRDARFMRRIRNGTVPNVPNVEVTARQLDFLARELSSHPQNLSDGQIRQGLSAMVQLLEHYFSEQGAGQARYRLMRRRASNEQRSGRQRYRARRHVAGTFGQADVVLQEDGHTDCRDECNQALRVTPRAALAMTIAPTNPAATSSQPVSMPIIISAAMIINETDGEQQMLAIGRALMSNPRLILLDEPSLGLAPIIIQQIFDTIEQLREQGMTIFLVEQNANQALKLADRGYVLENGHVVLSDTGDALLANEAVRTPDSFGIDDILLMDIVAIDNFELTMIDQHHQHVCRCQRLVKLRQSTKPGQFFRQLVNVRLNNQSFAAMPLGDQFSDFHRRAFAQVINIRFKRQTKAGDFQFTGAFIGSRQAISHRRFHLIDNPERFVIVHFARGTDKPRLLGVLCHDKPRINSNAVTAHARARLKNINARVTIRQANQFPDVNPLIGPNQRRFLARGSSNATAG

SEQ ID NO: 59510 - protein, 210 aa, Homo sapiens
RVVQAVQVIQLRLNLGGFCQLVLLIQSFIAFHALHLFKQRELANRHQLQVAGSAEWRPAQAFQHRFFFRRFAVVHKEVVDLVFGGFGKILAPDDRIAWDQRRLPDHLQFFQLLWRGGFQLVEVFGVVGGNIHLLVGDGQRVGFMPGVDGALEVAGDPAALGDNVIGKMLHVTHVTFQHGDFQTVVVVDVHMQRGDGEVVVMMLGGDNAAG

SEQ ID NO: 59511 - protein, 189 aa, Homo sapiens
  misc_feature (1)...(189): Xaa = X or * as defined in Table 2
KVTWVTCSILPMTLSPSAAFSSLFRMKILSLKXXKRILRSSGKPAARQGDMTQYGGSIVQGSAGVRIGAPTGVACSVCPGGVTSGHPVNPLLGAKVLPGETDIALPGPLPFILSRTYSSYRTKTPAPVGSLGPGWKMPADIRLQLRDNTLILSDNGGRSLYFEHLFPGEDGYSPQRVTVACAPRRGKTG

SEQ ID NO: 59512 - protein, 492 aa, Homo sapiens
  DOMAIN (243)..(257): 3-BISPHOSPHOGLYCERATE-INDEPENDENT PHOSPHOGLYCER domain identified by eMATRIX, accession number PD02407F, p-value=7.188e- 16, raw score of 7.61
  DOMAIN (101)..(145): Helix-turn-helix protein, copG family domain identified by PFam, accession name HTH_4, E-value=4e-11, PFam score of 50.4
MKGTVERADMHYIIRDFDRKQFEARKRKMMEIAKKAGVIRLLKKLQQQFGTACLFITHDLRLVERFCQRVMVMDNGQIVETQVVGEKLTFSSDAGRLTQMQRVTITLDDDLLETLDSLSQRRGYNNRSEAIRDILRSALAQEATQQHGTQGFAVLSYVYEHEKRDLASRIVSTQHHHHDLICAKTDGCNEARWFSLTTRNVKRRKAAGGHRQKTAADPALLSKKHHAEPCAGAGRLATAAMEDGDALIFMNFRADRAREITRAFVNADFDGFARKKVVNEDLGTVPCSISKTTTRRRSVHRKRIRSDGRSHILSVTAQRMPDGMILLEMAPMDNQRRLSQEQLQHAQQVAARDLVRGLAHEIKNPLGGLRGAAQLLSKALPDPSLLEYTKVIIEQADRLRNLVDRLLGPQLPGTRVTESIHKVAERVVTLVSMELPDNVRLIRDYDPSLPELAHDPDQIEQVLLNIVRNALQALGPEGGEITRLRLVFLSRA

SEQ ID NO: 59513 - protein, 297 aa, Homo sapiens
KILFIRLRVRLRSVRTRRFFMDVLIHLGFQVIGFSTENRLNTRTSNHYARCAQFFQAGLIHFRHISNADAQTGNTCVEVSNVFFTTKCSNQSRCHFAGTCRFCIFSRVFTTRRFQIQCFNQHAEDGVVNNRITDTDDREQPQFAAVTRQNDEVDQTVRERRTVTHPQKNTDWECQACQNRVDDVQDRRNEHEGELDRLGDTGQERGQRRKDHNTAHFRAVFWFSRVPDSNCGTWQTVHFEQEATRQFTRSPVTRHITRNVAVENLTCCVGVFTNLHLERYVPDVVQPNGTRQRSMKP

SEQ ID NO: 59514 - protein, 551 aa, Homo sapiens
MFLRKEQREVYEQAAECDGEVVRPKEPNWTAWANEIRLMCVQDGRTHKQICEMYSRVSRDPFWCRNVLSPSKLREKWDELSLRLSPSVSTYTEKREDPYFKASYDNVDYSQIPAGFRGRKNWSPGAYTVVLQRCGWRHSVKATPSQNETIFWRVVNGVYGKAVSGLHQFSKMGKSSQGHRMSPGFTDQRPGAAAIACMNLLVALGLQKHNIVVCDSKGVIYQGREPNMAETKRAYAVVDDGKRTLDDVIEGADIFLGCSGPKVLTQEMVKKMARAPMILALANPEPEILARWRKKCVRMPSFAPVVLTIRTRKCRCLNVRNVKLINIRRIAVMMRSSKMASERSTDVQAFIGELDGGVFETKIGAVLSEVASGVMNTKTKGKVSLNLEIEPFDENRLKIKHKLSYVRPTNRGKISEEDTTETPMYVNRGGRLTILQEDQGQLLTLAVSELSATFCVSPAQEATQQHGTQGFAVLSYVYEHEKRDLASRIVSTQHHHHDLSVATLHVHINHDDCLEIAVLKGDMGDVQHFADDVIAQRGVRHGHLQCLPKED

SEQ ID NO: 59515 - protein, 72 aa, Homo sapiens
  misc_feature (1)...(72): Xaa = X or * as defined in Table 2
MLIVFSLPSDTLVLSPLXPNFRTRPFRPSSVPRXXPKKDLKIATSAMMEAAYSSVIANVVLVPVMDAKWLAR

SEQ ID NO: 59516 - protein, 85 aa, Homo sapiens
PGRTGCRSSCGSRHPGQHGGSQAKVNPFSERDIDVARQNYLAQEVLGTTRRQISGMYIFWLLRANIICCRRASTSTWSGRLIPYQ

SEQ ID NO: 59517 - protein, 515 aa, Homo sapiens; identical to SEQ ID NO: 39247
  DOMAIN (303)..(332): AMINOTRANSFERASES CLASS-V PYRIDOXAL-PHOSPHATE ATTACHMENT SI domain identified by eMATRIX, accession number DM00813A, p-value= 6.250e-22, raw score of 20.30
  DOMAIN (180)..(496): Aminotransferases class-V domain identified by PFam, accession name aminotran_5, E-value=1.9e-41, PFam score of 151.1

SEQ ID NO: 59518 - protein, 198 aa, Homo sapiens
  DOMAIN (105)..(155): Sigma-70 factors family proteins domain identified by eMATRIX, accession number BL00715, p-value=7.097e-32, raw score of 24.82
  DOMAIN (85)..(196): Sigma-70 factor domain identified by PFam, accession name sigma70, E-value=9.3e-07, PFam score of -19.1
  misc_feature (1)...(198): Xaa = X or * as defined in Table 2
LSSLKIVKLLRSTANSQVIDFQRWLGHDKRATLLLWKLEAAGSPLRPLSVQVTTPQEVAETDNHADNSYNAGLFIVNSLYTAEGVMDKHSLWQRYVPLVRHEALRLQVRLPASVELDDLLQAGGIGLLNAVERYDALQGTAFTTYAVQRIRGAMLDELAAVTGCRAACDATRVKWHRQXGNWSRNLAAKPRKLRXRNV

SEQ ID NO: 59519 - protein, 783 aa, Homo sapiens
  DOMAIN (29)..(72): Transcriptional regulatory protein C terminal. domain identified by eMATRIX, accession number PF00486C, p-value=1.000e- 40, raw score of 20.21
  DOMAIN (462)..(743): HlyD family secretion protein domain identified by PFam, accession name HlyD, E-value=1.7e-37, PFam score of 138.0
MVLDLMLPGEDGLSICRRLRSQSNPMPIIMVTAKGEEVDRIVGLEIGADDYIPKPFNPRELLARIRAVLRRQANELPCAPSQEEAVIAFGKFKLNLGTREMFREDEPMPLTSGEFAVLKALVSHPREPLSRDKLMNLARGREYSAMERSIDVQISLSLIPYWNSAVIDQVDLGSLSLTGHDGILITVWLGISIMVFSFNFSPIVSSFVVSKREEYEKDFGRDFTERARGPFVHVERLIILLKIVKLLRSTANSQVIDFQRWLAHANRQTLPFFTADTHAVIQFQVVANHRNLLHGFDTGTNQLRCIDTVLNGFNNFLRGRFTRQHIGVGHTRHGQMGVGFTATVASRRHPHQTRVEFILHVAFQKCRSQSARCTGLAYLRNHSQPTFGIEHCALLNTGHNFKAQVSDCALKLKCTAVKWLSKRTNGYVKTPGNWPNISACAPVDTPQRITTPIPVFLHDTTVFRVTGVVIEVTDKKNTLIKKGEVLFRLDPTRYQARVDRLMADIVTAEHKQRALGAELDEMAANTQQAKATRDKFAKEYQRYARGSQAKVNPFSERDIDVARQNYLAQEAFVKSSAAEQKQIQSQLDSLVLGEHSQNRSLKAQVVEAKYNLYQTIVRAPSNGYVTQVLIRPGTYAASLPLRPVMVFIPDQKRQIVAQFRQNSLLRLAPGDDAEVVFNALPVLQLAYAVIHPRPAALVFTGIQIEVEATAQFVIFVIQFDRIPRHTADTGNTSGFDAGQHMVQAVTELVEEGDHFVVSEQRRFTIYRAVELRIVLWHMSEGLD

SEQ ID NO: 59520 - protein, 248 aa, Homo sapiens
MNEDKGFRSLLHRAVQFDIAKRILGLNSSARSARDVAALDPLRFEIVKHSGHLVEDLCRRVIRSVTLQVLLRFVDSASAILPVSIFSSPLRSPVLTLRHRRDVMNDNALCASVTTGTVISGFLLSFSARDQRCPPPFLPTPARFITVNNRLHQIGGIVLSWKSFSACCTGLPGLSLKFRGYHQKTLNRGVPVHGFCADLCHAHPVTRSAMVNSAFTGLRSRSAYSCRATVRHCIGQGATDRQAVSQFR

SEQ ID NO: 59521 - protein, 151 aa, Homo sapiens
STKRSKTRRPTDRMTRLAKNLDQMSAVLNDLKTVMDQEQQHLSMGQINGSQLQWITEQKSSLLATLDYLEQLRRKEPNTANSVDISQRWQEITVKTQQLRQMNQHNGWLLEGQIERNQQALEMLKPHQEPTLYGANGQTSTTHRGGQKISI

SEQ ID NO: 59522 - protein, 822 aa, Homo sapiens; identical to SEQ ID NO: 54721
  DOMAIN (56)..(110): Chaperonins cpn60 proteins domain identified by eMATRIX, accession number BL00296B, p-value=1.000e-40, raw score of 15.98
  DOMAIN (482)..(694): Elongation factor Tu family domain identified by PFam, accession name GTP_EFTU, E-value=7.4e-82, PFam score of 278.5

SEQ ID NO: 59523 - protein, 323 aa, Homo sapiens
  DOMAIN (20)..(39): LACR BACTERIAL REGULATORY PROTEIN HTH SIGNATURE domain identified by eMATRIX, accession number PR00037B, p-value=9.182e- 15, raw score of 11.84
  DOMAIN (20)..(123): Bacterial regulatory proteins, deoR family domain identified by PFam, accession name deoR, E-value=2e-47, PFam score of 170.6
MRATQIEREPAYGNAARYSRDIRKLRKQGLITRHHGGAGRVSSVVNTAFEQCEVSQTEEKKAIAEAVADYIPDGSTIFITIGTTVEHVARALLNHNHLRIITNSLRVAHILYHNPRFEVMVPGATGERESAQTQEGRHSVATAEQKATVTTTTEHCSTTNLQKRIKADTDGRSESCNDMRRYLAHTANEQEHEQPNGHSAVGQTVANETTGSPISTGSEQELRRKLAAPIMGKNGPEEIDATAEDYERDIAWCHEHGYLDDSRFVARFIASRSRKGRIACEGISVFGEVLWQGNDADAAQLEQLVGQPVRVSALARFSFAERH

SEQ ID NO: 59524 - protein, 344 aa, Homo sapiens
  DOMAIN (112)..(129): DIHYDRODIPICOLINATE SYNTHASE SIGNATURE domain identified by eMATRIX, accession number PR00146C, p-value=5.846e-19, raw score of 16.25
  DOMAIN (31)..(265): Dihydrodipicolinate synthetase family domain identified by PFam, accession name DHDPS, E-value=9.6e-105, PFam score of 361.4
DTCLHRGWPMFTGSIVAIVTPMDDQGNVCRASLKKLIDYHVASGTSAIVSVGTTGESATLNHDEHADVVMMTLDLADGRIPVIAGTGANATAEAISLTQRFNDSGIVGCLTVTPYYNRPSQEGLYQHFKAIAEHTDLPQILYNVPSRTGCDLLPETVGRLAKVKNIIGIKEATGNLTRVNQIKELVSDDFVLLSGDDASALDFMQLGGHGVISVTANVAARDMLQMSKRGSADKSAGIISPAASFIISPGTSWSIDGSPPVLVAPTEYVVTSHPPCLKELMLRQKDYERVIAWCHEHGYLDDSRFVARFIASRSRKGYGPARIRQELNQKGISPRSDRKSEAGM

SEQ ID NO: 59525 - protein, 38 aa, Homo sapiens
  misc_feature (1)...(38): Xaa = X or * as defined in Table 2
VHAXGSLFFPELSMHQDLSQGHEVQLPPVNRSLKPNQK

SEQ ID NO: 59526 - protein, 1082 aa, Homo sapiens
  DOMAIN (1)..(107): PH domain identified by PFam, accession name PH, E-value=1.5e -20, PFam score of 78.4
MKISNEETLQSFKAWRKRWFILRRGQTSSDPDVLEYYKNDGSKKPLRTINLNLCEQLDVDVTLNFNKKEIQKGYMFDIKTSERTFYLVAETREDMNEWVQSICQICGFRQEESTAAVFILGAVAAWPPSIDPCSSTGRAFILQVFWSYKAIDSVSRHPTHQETCMGAHLGVHIALSPAAPISTSPKNKNPHLSPRCLTVCRPPGPSLHLRGVSARTSTPAREQNMQEWKRLTQRLMGTQCFVLVPFILSHARGTPGELAEMLVFISEPRSDPSAAALLEFAGGPLQTLYHRQISPVEYHQWRLQNSKDGCLFLALEASSQSSTCQMPAGALLYEVSVDACWEILPGSLRWKALHKAFLALLTTTREGSSRSVCSRVLIPPDCGGANPGGISTRELKTPKDQVKGTKDKYKHEDPASSPALLSAGEAQHALETCSVMEAHAVGLVLCVERNRKGEGMQRPRKEGCEARWPMLAEESAHTERRTQFQNHSHKAEGCRVAEQDGPLEITVTLGRVWGDQEGTQSLSVAALETATAPSSFIDSLFTTCLISQNLRFNNSKLFLFPRSASFSQGSEAPFIMRRNTAMQNLAQHSGYSVDGVSGHIHGFHSLSKPSQHNAEFRGSTHRIPWSLASHGHTRGSLTGSEADNEGVYPFKAPRSTLFQEFGGHLVNNSGVPATPLSVHQIPRTVTLDKNLYAMVVATPGPIASLPLPKASQAEACQWGSPQQRPLVSESSRWSVAAAIPRRNTLPAVDNSRCHQASSGKYTQHGGGNASRPAESMHEGVCSFLPGRTLVGLSDSIASEGSCVPMNPGSPTLPAVKQAGDDSQGVCIPVGSCLVRFDLLGSPLTELSMHQDLSQGHEVQLPPVNRSLKPNQKDQEEELELRFQAAMTSPCGLGPARGSRKEWDNWVGISPVGLATGNQTQRVALEPQHLMVSTCFHANPTPPNLRNNRVINELSFKPPVTEPWSGTSHTFDSSSSQHPISTQSITNTDSEDSGERYLFPQNPASAFPVSGGTSSSAPPRSTGNIHYAALDFQPSKPSIGSVTSGKKVDYVQVDLEKTQALQKTMHEQMCLRQSSEPPRGAKL

SEQ ID NO: 59527 - protein, 94 aa, Homo sapiens; identical to SEQ ID NO: 55598

SEQ ID NO: 59528 - protein, 570 aa, Homo sapiens; identical to SEQ ID NO: 44475

SEQ ID NO: 59529 - protein, 54 aa, Homo sapiens
  misc_feature (1)...(54): Xaa = X or * as defined in Table 2
GDCSGCVEKQERCCNRNTTXXASAPGNARWNSYVGXKHHSCQWGDYRRQCFRGE

SEQ ID NO: 59530 - protein, 1063 aa, Homo sapiens
  DOMAIN (1015)..(1046): Thymidine and pyrimidine-nucleoside phosphorylases proteins domain identified by eMATRIX, accession number BL00647D, p-value= 3.348e-32, raw score of 15.19
  DOMAIN (695)..(878): AcrB/AcrD/AcrF family domain identified by PFam, accession name ACR_tran, E-value=1e-100, PFam score of 348.0
MLIPTGTSVGLTSVSLGVIRAMERKGVRLSVFKPIAQPRTGGDAPDQTTTIVRANSSTTTAAEPLKMSYVEGLLSSNQKDVLMEEIVANYHANTKDAEVVLVEGLVPTRKHQFAQSLNYEIAKTLNAEIVFVMSQGTDTPEQLKERIELTRNSFGGAKNTNITGVIVNKLNAPVDEQGRTRPSRLSLDRGDLLLPGGAMGRILHPFFGIAIFVALMFMFVRFVHHNIPDKKDIPWLLNIVEVLKGNEHKVADVGKYNAGQKMMFWSIMSMIFVLLVTGVIIWRPYFAQYFPMQVVRYSLLIHAAAGIILIHAILIHMYMAFWVKGSIKGMIEGKHCPADLLFQRLGRLHRHHRKYRPAGFEIPVATILLPDGEGYGRHEHIYSNVRVMWRTQQHIEELNGASLFFPDAYRQWLDSIYDDAEMDEPEWVGNGMDKFESAECEKRFKARKVLQWAEEYSLQDNDETILAVSNLEGGICFEITQIWRISCADQPGFKVQSLLRFAFISGSIFHDFLVNTHAAFVRVIEPYNGLGDLQNRLLRHVSPAFGEDPLRVLRVARFAARYAHLGFRIADETLALMREMTHAGELEHLTPERVWKETESALTIRNPQVFFQVLRDCGALRVLFPEIDALFGVPAPAKWHPEIDTGIHTLMTLSMAAMLSPQVDVRFATLCHDLGKGLTPPELWPRHHGHGPAGVQADAKFRMLPEDVDKLYVRSANGEMVPFSAFTTSHWVYGSPRLERYNGLPSMEIQGEAAPGTSSGDAMALMENLASKLPAGIGYDWTGMSYQERLSGNQAPALVAISFVVVFLCLAALYESWSIPVSVMLVVPLGIVGVLLAATLFNQKNDVYFMVGLLTTIGLSAKNAILIVEFAKDLMEKEDAQKYLAIADELFGADWADARHYRFGASSLLASLLKALGHGDEIIRKKRDGHALSDEEIRFFINGIRDNTISEGQIAALAMTIFFHDMTMPERVSLTMAMRDSGTVLDWKSLHLNGPIVDKHSTGGVGDVTSLMLGPMVAACGGYIPMISGRGLGHTGGTLDKLESIPGFDIFPDDNRFRELKPS

SEQ ID NO: 59531 - protein, 448 aa, Homo sapiens
  DOMAIN (363)..(390): PEP-utilizing enzymes phosphorylation site proteins proteins domain identified by eMATRIX, accession number BL00370B, p-value= 1.563e-09, raw score of 18.75
  DOMAIN (342)..(384): PEP-utilizing enzymes domain identified by PFam, accession name PEP-utilizers, E-value=1.3e-09, PFam score of 35.5
MGHFRLFSYPYARYQSAFKEEAPGSDVIVCAEMDEQWGYVGAKSRQRWLFYAYDSLRKTVVAHVFGERTMATLGRLMSLLSPFDVVIWMTDGWPLYESRLKGKLHDLASLEPFFTLGAFKFIHAIADPFWLIHFRIIVNAIQPLPVTERLCPGPPRSEKVGSAKGPEAEEALIAFRQLAEDNFGETEEVAPPTLRPVPPVSGKAFYYQPVLCTVQAKSTLTVEEEQDRLRQAIDFTLLDLMTLTAKAEASGLDDIAAIFSGHHTLLDDPELLAAASELLQHEHCTAEYAWQQVLKELSQQYQQLDDEYLQARYIDVDDLLHRTLVHLTQTKEELPQFNSPTILLAENIYPSTVLQLDPAVVKGICLSAGSPVSHSALIARELGIGWICQQDSRHKGVNITRHSKVTNIRQYQCWQQTFLGKAPTPVQGHSFVVFTAHACAEKRANVEC

SEQ ID NO: 59532 - protein, 410 aa, Homo sapiens; identical to SEQ ID NO: 55601
  DOMAIN (238)..(288): ELEMENT INSERTION TRANSPOSABLE SEQUENCE TRANSPOSASE FOR domain identified by eMATRIX, accession number PD02662B, p-value= 1.000e-40, raw score of 20.18
  DOMAIN (188)..(407): Transposase (IS4 family) domain identified by PFam, accession name Transposase_11, E-value=3e-22, PFam score of 87.3
  misc_feature (1)...(410): Xaa = X or * as defined in Table 2

SEQ ID NO: 59533 - protein, 524 aa, Homo sapiens; identical to SEQ ID NO: 49555
  DOMAIN (264)..(314): ELEMENT INSERTION TRANSPOSABLE SEQUENCE TRANSPOSASE FOR domain identified by eMATRIX, accession number PD02662B, p-value= 1.000e-40, raw score of 20.18
  DOMAIN (219)..(494): Transposase (IS4 family) domain identified by PFam, accession name Transposase_11, E-value=1.6e-100, PFam score of 347.4

SEQ ID NO: 59534 - protein, 1197 aa, Homo sapiens; identical to SEQ ID NO: 33126
  DOMAIN (393)..(425): Nuclear hormones receptors DNA-binding region proteins domain identified by eMATRIX, accession number BL00031B, p-value=3.893e- 25, raw score of 22.25
  DOMAIN (188)..(432): Zinc finger, C4 type (two domains) domain identified by PFam, accession name zf-C4, E-value=6.8e-38, PFam score of 130.3

SEQ ID NO: 59535 - protein, 281 aa, Homo sapiens
  DOMAIN (12)..(60): ELEMENT INSERTION TRANSPOSABLE SEQUENCE TRANSPOSASE FOR domain identified by eMATRIX, accession number PD02662A, p-value= 1.000e-40, raw score of 25.70
  DOMAIN (55)..(281): Transposase (IS4 family) domain identified by PFam, accession name Transposase_11, E-value=4.4e-35, PFam score of 130.0
MNYSHDNWSAILAHIGKPEELDTSARNAGALTRRREIRDAATLLRLGLAYGPGGMSLREVTAWAQLHDVATLSDVALLKRLRNAADWFGILAAQTLAVRAAVTGCTSGKRLRLVDGTAISAPGGGSAEWRLHMGYDPHTFTDFELTDSRDAERLDRFAQTADEIRIADRGFGSRPECIRSLAFGEADYIVRVHWRGLRWLTAEGMRFDMMGFLRGLDCEVPDPKRRTNSLWRITKMVIWSLQVAIRGTVSLTAYKTQLKNARHRLNEAPRRRILQMVQPLS

SEQ ID NO: 59536 - protein, 1067 aa, Homo sapiens
  DOMAIN (401)..(451): ELEMENT INSERTION TRANSPOSABLE SEQUENCE TRANSPOSASE FOR domain identified by eMATRIX, accession number PD02662B, p-value= 1.000e-40, raw score of 20.18
  DOMAIN (346)..(588): Transposase (IS4 family) domain identified by PFam, accession name Transposase_11, E-value=1.1e-39, PFam score of 145.3
PGHPWDGEHPADAQQNTVDNTTKCSGCRTFQGWTALSDMLPGQGLLHVVPIPEAMAYVLLRPLLDDVPEDELCGVAPGRVLPVSEQWHPLLIEALTSIPKLEAGDSVWWHCDVIHSVAPVENQQGWGNVMYIPAAPMCEKNLGFTPKGKAALEKGASPGDFPREDYETNWEGRFTLADLNIHGQPAPEWMWGWERLLSDQDKTQGSAFSCTATFQDAQKQLLQARFIHLSGLWEQQDGLWLSNWLSLKGQIGGPALTEPLRLSVNRGTWPPKLRDARRRSAGRADRRAPTPEGSRSPPLSEAPKLSSEELDTCIEEAANKGMEETTTTEGAGSTAERSCTYGPVGMSLREVTAWAQLHDVATLSDVALLKRLRNAADWFGILAAQTLAVRAAVTGCTSGKRLRLVDGTAISAPGGGSAEWRLHMGYDPHTCQFTDFELTDSRDAERLDRFAQTADEIRIADRGFGSRPECIRSLAFGEAEYIVRVHWRGLRWVTAEGMRFDMMGFLRGLDCEKVNLGLDNNTWGGGFSKYCLVPGEILKIHRHALWEIPDGVDYEDAAVLDPICNAYKSIAQQSKFLPGQDVVVIGTGPLGLFSVQMARIMGAVNIVVVGLQEDVAVRFPVAKELGATAVVNGSTEDVVARCQQICGKDNLGLVIECSGANIALKQAIEMLRPNGEVMAGAIGVTLGFLLVQIINTILSYFVMIKPVLGSSYRQYILSLWLPFYLSLPTLVVSYALGIVLKGQLALGMLLAVQIATGVLAFVVMIVLSRHPLVVEVKRQFCRSEKMKMLLRAGTRRRGLYSLSEMDDPQWVGNGMDKFESAECEKRFKARKVLQWAEEYSLQDNDETILAVTRDGEMSLPLLPYVQTSSGKQLLDGQVYEDLSHEQQYEALALNRVNVPFTWKRSFSEVVDEDGLLWLEGKQNLDGWVWQGRDRETGEVKFTASRADLVFGSNSVLRAVAEVYASSDAHEKFVKDFVAAWVKVNSALVSINPQNGAVMALVGGFDFNQSKFNRATQALRQHPIAVSTPSGLLTVALAGHLHYTVNSSRAWTLPVEHCVPSAQCLAHE

SEQ ID NO: 59537 - protein, 136 aa, Homo sapiens
  misc_feature (1)...(136): Xaa = X or * as defined in Table 2
IKTLPLSPDKLTRISKSIYRKQRAALFTHSFTTWVLAILEHRRFFAKXTRSISKAHVISCVAGHTLAAAPQPHYFTRETYSPERVSTLMTSPICTNSGTLTTAPVDRVAGLPPVPAVSPFRPGSVSTISSSTKFGG

SEQ ID NO: 59538 - protein, 475 aa, Homo sapiens
  DOMAIN (182)..(232): Sugar transport proteins domain identified by eMATRIX, accession number BL00216B, p-value=7.750e-10, raw score of 27.64
  DOMAIN (1)..(91): Lysozyme domain identified by PFam, accession name Phage_lysozyme, E-value=0.00013, PFam score of 21.8
MLGKTYTKAECKALLNKDLATVARQINPYIKVDIPETSARRSLLIRLHVGAGNFRTSTLLRKINQGDVIAVCLPLCADSQYQPESINRVEQSCLSSDVSEKNLNNRLPKKLNNTVNSTQIYRHRAKIQKTIWRQHPKETTKQNSRPKRTKLPREQRDKKERKRTNTKYGETINTEGDKQKMLAIGRLVSGFPHGAFFGVGAIVLSKIIKPGKVTAAVAGMVSGMTVANLLGIPLGTYLSQEFSWRYTFLLIAVFNIAVMASVYFWVPDIRDEAKGNLREQFHFLRSPAPWLIFAATMFGNAGVFAWFSYVKPYMMFISGFSETAMTFIMMLVGLGMVLGNMLSGRISGRYSPLRIAAVTDFIIVLALLMLFFCGGMKTTSLIFAFICCAGLFALSAPLQILLLQNAKGGELLGAAGGQIAYNLGSAVGAYCGGMMLTLGLAYNYVTLTAALLSFAAKSTAALAVLSNPHWCGKAT

SEQ ID NO: 59539 - protein, 34 aa, Homo sapiens
  misc_feature (1)...(34): Xaa = X or * as defined in Table 2
IQTMQAACSPYQTGLSGHCWXWXGSRRPLEPPFH

SEQ ID NO: 59540 - protein, 401 aa, Homo sapiens
  DOMAIN (275)..(291): Protein kinases ATP-binding region proteins domain identified by eMATRIX, accession number BL00107B, p-value=2.059e-09, raw score of 13.31
  DOMAIN (271)..(353): Eukaryotic protein kinase domain identified by PFam, accession name pkinase, E-value=6.3e-13, PFam score of 50.5
MAWHKEHGVELRDRRLNFEWWKPEYGINLYQDYYKQDGFVEIPDQNNPSLGDMVIMQIGQNVPVWNHAGIYLGDNQILHHAFGSQTMNDVKLIKLSGSLGRRFGVFHRFAVDSYPEAIRALSSQNAANAEAAIENALANDKDAIYMKKENGKRKAEYTKSLKLIADETEARVTAVEQLRASFGDQISASNSELREVIATETGALSREIDQLKAEIGDDIQASLTDIREAIANETEARTQADLSLSARLGNNEAALSQKLDSWSNADSTGAMYGVKLDIWSIGVLTYVMLSGVSPFLDESKEETCINVCRVDFSFPHEYFCGVSNAARDFINVILQEDFRRRPTAATCLQHPWLQPHNGSYSKIPLDTSRLACFIERRKHQNDVRPIPNVKSYIVNRVNQGT

SEQ ID NO: 59541 - protein, 34 aa, Homo sapiens; identical to SEQ ID NO: 59539
  misc_feature (1)...(34): Xaa = X or * as defined in Table 2

SEQ ID NO: 59542 - protein, 325 aa, Homo sapiens
  DOMAIN (87)..(105): NLP/P60 family domain identified by eMATRIX, accession number PF00877C, p-value=5.632e-09, raw score of 10.03
GIINVRKNRHTGSPGHRGKPGTREDEHGVELRDRRLNFEWWKPEYGINLYQDYYKQDGFVEIPDQNNPSLGDMVIMQIGQNVPVWNHAGIYLGDNQILHHAFGSQTMNDVKLIKLSGSLGRRFGVFHRFAVDSYPEAIRALSSQVDGFKEYMQSEIGSRSKFAIFVDGVNVGHHEEEKFKCAKEIRIVPIPTGSKTGGLFQVVLGAAIMVAAFYTGGASLALMGTMSSSLFMMGGAMVLGGVMQMISPQPGWRNFEVQSSKNKPSYAFGGAVNTTGGGIPSPGPVWISRRRWRNFLSRFLCRGYELKLTRLARVFFRLYNESTDK

SEQ ID NO: 59543 - protein, 2681 aa, Homo sapiens
  DOMAIN (2463)..(2481): NLP/P60 family domain identified by eMATRIX, accession number PF00877C, p-value=5.632e-09, raw score of 10.03
  DOMAIN (2377)..(2505): NLP/P60 family domain identified by PFam, accession name NLPC_P60, E-value=0.014, PFam score of -9.4
MNQETLIAVIEQMRKLVPALRKVPDETLYSWVEMAELFVCQKTFKDAYVKALALYALHLAFLDGALKGEDEDLESYSRRVTSFSLSGEFSQTFGEVTKNQSGNMMLSTPWGATTWSIRINDRTPWRMPLMNYSQIERMARKGVAFFTDPSRPMNLIKQGEYGYDENGFEIPPMEKVIPISGATRRPNAREIDGETIRASDILGIFNNDHEINEGDYIEIDGVRHVVVDARPVQASLEPVAYRPIRRFQGEIDAWIKAAESTLEHAIEIFVRDVHDALVSRSPVDTGRFKGNWQITFNEIPNHALNRYDKTGGVVRGLDHIWLTQSSRQGDSKMHYELSAAARAAFLSKYRDFPHYMENRNFTPPKDGGMWLRFNYIEGDTLYLSIDRKCKSYIAIVQIGVVFPPGSGVDEARLKAKEIADFFKDGKMLNVGYIFEGAIVHQIVKHESGTSRHKGDLIMHLPNGAQIFVETSRGVEVEATAITNADNPVATVASKGDLAKGDYVIVTQSTWAKMVSRVLIVTDAQETSITLAGIDTSDTLVFPAGGTMSFSKITGWTEIPCVQEIGQDGGEQQYYTYQCLSDDKEQQIPTFKSAVSLTYTFAHEFDNPIYPILRKLDSSGQVTAVRMYVPKASEMRMWAGILSFNDIPSTQVNEMETVELSVSLKDFKLPVTFTMPNGEDATIIFTVRHLSSKEVQDMYAKQGEMNDSDFITKIASGWNLEEEFNEENARKLVQYYPSAAYNLTATYIKALAGHRAKTKKGGNRRQKSSCDRVGLSLSDYGRRGNRNDKSAMLKMVKAWNVFTSMLTQWRSSGAEAYGLDYNVLRGYMVDKVAGLSLDVDVSTVQRAVKSLKEFSKANDQAADSMGSLINESEVAKQKAKEHAEQLKRQRKEYEAVEKAIDPTVSKMERLKIASQQLDKLWQQGVVPDETFFRLGEMLDLQNAKLARSRAMLTEEGQAALQEAKAKEQAAARSKAFMDALNGQVNAIGKTHAELMELKAAELGLSKEAAPLIAKLKDQGRAMNAAGISAGEYRQAMRMLPAQITDVVTSLASGMPVWMVAIQQGGQIKDSFGGIGNTFKVLLSYINPVTAGVGVLVGSLGLLAKAGYDSYKSITDIQNALIETGGYAGVTAEDLDSVSKKIAQTSNSTIGSIREIVTELASSGKYTREQIQNITKATAEWSAATGKSASQIIAEFDKIASDPVKGLEKLNEQYNFLEKGQLTYIDTLSRTKGETEAVSEATKLFADVMEKRMKSIADNSTPLEKMWSDIKQWASDAWGWVGDHTLGALNLIIDVVQGTVIQVKMILAKGDEYISNFIASAIKATQSLPGMSDFGADVLKEQENIVKSSRDNYDQLASELDAINARVEKGEMGYVEAMKQRRTLEKQYSEETKEAIRKEAEEIEKRNRERNKQSKIVRSPTEQFDKELISLKAQLKVLQEHKEIGQKLSAQRKALFTTEATIAVLREASSKRQLSAEEKALLASQEKVIELAKQKAEIGDQIVKQQQLNALTDKSLKFVNEMTAATEQLNASRGLSTREMERQAELAKITTDYINSGGSEGDEKLQNMIKAQNDYYAAEDAKRADWLAGAESAFADYEGGNFKELYKKKFGTVLAKNRAMTPEQLFDLSVKYFEWAEDNAIKASESASFQGGVYESLVHKPRVFTWTGYRLFIGASEAAIIKWKREEEYSEVMEFVESVINEQKFQLAANGVINASFIGKDLGIDKPASINIENSAASASTAVATTEEAMKEAKLAIKKMSEANFEKMIRIWFQLMQAQQFQPNWHHLYLCHEVEEIIAGRRGNTIFNVTPGSGKTEVFSIHLPVYAMLKCKKVRNLNVSFADSLVKRNSKRVREIISSNEFQELWPCKFGTSKDEEMQVLNEDGKVWFELISAAAGGRITGSRGGYMTPGFSGMVMLDDIDKPDDMFSKVKRERTHMLLKNTIRSRRMHNETPIIAIQQRLHAQDSTWFMMNGGMGIEFDQISIPALVTEEYGKTLPDWLQPYFERDVLSSEYVELDGVKHYSFWPSKESVHDLLALREADQYTFDSQYQQKPIALGGSVFNSEWWTYYGNSLDADEPDPGKYDYRFITADTAQKTGELNDYTVFCLWGKNNDKVYFIDGIRGKWEAPDMERQFTAFVNQAWRHNKSMGVLRKIYVEDKASGTGLIQNLRKKTPISITPLQRNKDKVTRAMDAQPVIKAGRVVLPEEHPMLAEIIAEHSAFTYDDTHTHDDIIDNFMDAANIELLTIDDPIERMKRLVGMAKRSLMRYNHGCQLTALFIGGNMKIVKPDGYNDIFNGGADRSPKPSFSLKHHITSDLSTTTTQPRSELWMLFPKRCHTGDGATTLPSAHDTCMCNEMEVTWIIVSVPEGDMRFVKPEKLLLIGRPWSLGSFDCYGLVMAWHKEHGVELRDRRLNFEWWKPEYGINLYQDYYKQDGFVEIPDQNNPSLGDMVIMQIGQNVPVWNHAGIYLGDNQILHHAFGSQTMNDVKLIKLSGSLGRRFGVFHRFAVDSYPEAIRALSSQVDGFKEYMQSEIGSRSKFAIFVDGVNVGHHEEEKFKCAKEIRIVPIPTGSKTGGLFQVVLGAAIMVAAFYTGGASLALMGTMSSSLFMMGGAMVLGGVMQMISPQPGGANFEVQSSKNKPSYAFGGAVNTTAAGYPLPVPYGYRAGGGATFSAGSYAEDMS

SEQ ID NO: 59544 - protein, 292 aa, Homo sapiens
  DOMAIN (65)..(84): SODIUM/ALANINE SYMPORTER SIGNATURE domain identified by eMATRIX, accession number PR00175D, p-value=9.357e-20, raw score of 10.85
MAEGKEEQVTSYMDGSKQRESLCRENQPYKTIRSHETYSHRLPDHYPFRPAGGARAQGIVQMIGIFIDTLVICTASAMLILLAGNGTTYMPLEGIQLIQKAMRDYYKQDGFVEIPDQNNPSLGDMVIMQIGQNVPVWTHAGIYLGDNQILHHAFEELDKLISDRPESCRRPGKPGEPEAPVLTHATTVAVAHGCLAVSQLPPQPLMTLSLQSVPLHHQVQPQAHLAPDSPAPAQTPPLHALPDLSPSPLPHPAMGRAPVDFINISTDMNTEVDALDPSIMDFALQGEAGGME

SEQ ID NO: 59545 - protein, 67 aa, Homo sapiens
  misc_feature (1)...(67): Xaa = X or * as defined in Table 2
CVESRCCHATRCGSKXYSGPPEDTDLKTEAAGAGVACDAAEAPDEAPPAKLHVLPPIIPEIVLKITI

SEQ ID NO: 59546 - protein, 782 aa, Homo sapiens
  DOMAIN (564)..(582): NLP/P60 family domain identified by eMATRIX, accession number PF00877C, p-value=5.632e-09, raw score of 10.03
  DOMAIN (478)..(606): NLP/P60 family domain identified by PFam, accession name NLPC_P60, E-value=0.013, PFam score of -9.0
MATLDTFGWCTQVQGGGGSLTTTNNDRSIQFGNGYMQLASSGFNTTRREYSVVYAGEDFIAVYDFCDSHRIKPFAWTPPDGKIGIWVVKPNSLGAKPVSRDVMEINVTFMEQFTSMDCRMVAGKQEEKSMSENKKLYDEESGKSLFHNCLQSLYPGEIITLIEVDGSKFGAQVYRFHGENIQYTPEEIMQAQQTGTLPPKEITFRGEKYGARPFGISGISFDSSGKATKPQLTVANIDSRVSAMIRAYNGLMQAKVTIWITQRELINSDGSIADGAYRKLVYYIERPNYVDKSVARFDLTSPYDMDGIMIPSRLTQSVCYWAQRGWYKTGKGCGYNGQNGYFDKDNNPVDDPSLDFCPGTEKSMISAKIKLEIMTHAQEEYPRECCGVVTQKGRVQKYHRVDNVHRDPENHFMMDAVQYACIEDDADSTTIAIVHSHTGDGATTLPSAHDTCMCNEMEVTWIIVSVPEGDMRFVKPEKLPLIGRPWSLGSFDCYGLVMAWHKEHGVELRDRRLNFEWWKPEYGINLYQDYYKQDGFVEIPDQNNPSLGDMVIMQIGQNVPVWNHAGIYLGDNQILHHAFGSQTMNDVKLIKLSGSLGRRFGVFHRFAVDSYPEAIRALSSQVDGFKEYMQSEIGSRSKFAIFVDGVNVGHHEEEKFKCAKEIRIVPIPTGSKTGGLFQVVLGAAIMVAAFYTGGASLALMGTMSSSLFMMGGAMVLGGVMQMISPQPGGANFEVQSSKNKPSYAFGGAVNTTAAGYPLPVPYGYRAGGGATFSAGSYAEDMS

SEQ ID NO: 59547 - protein, 96 aa, Homo sapiens
MKITPEQAREALDAWICRPGMTQEQATILITEAFWALKERPNIDVQRVTYEGGAIDQRALGVNRVKIFERWKAIDTRDKREKFTALVPAIMEATTG

SEQ ID NO: 59548 - protein, 78 aa, Homo sapiens
LALPPPVWPCTRRRKLSRRLNLALITLGASVVVSMTCRQASLAAGSILSFTCVIAPVTSWLVRPMTSIASCLPPEKGC

SEQ ID NO: 59549 - protein, 100 aa, Homo sapiens
YRCRSRPESGRKTNKGHKEKLYAEYLLPVCSPLLLTGEKPLKTPEDLAKHTLLHDASRRDWQIIRALCFPPRRPFLGLGTVQVKTANGLGPIGPNGFFAT

SEQ ID NO: 59550 - protein, 33 aa, Homo sapiens
KHWPEKLWVVVRTASSQNLPTMHKRRQAINMCW

SEQ ID NO: 59551 - protein, 45 aa, Homo sapiens
QGPSKETKEAAKRTLGQFCFLLPSCSPFASSPAHTRARAHICTHV

SEQ ID NO: 59552 - protein, 89 aa, Homo sapiens
RRLAIFHDQVGGKRRLCQLKAFMQSIAVALNHDRHHWHGNRENKVNCQLICVDIIINTAQPITSESDQRQHTLLRRQTRRDRRHWSHEP

SEQ ID NO: 59553 - protein, 129 aa, Homo sapiens
  misc_feature (1)...(129): Xaa = X or * as defined in Table 2
YTVSFLLVITQLGFCSVYFMFMADNLQQMVEKATRDLQHLPAQGDSDADPHPGHSFLHADNPALPDPVGVYPEPQGAVRLLDIGQHHHPWEHGSDLXVYHGGDSISQQPTLDGKLEDLLAVLWYSHLHI

SEQ ID NO: 59554 - protein, 849 aa, Homo sapiens
  DOMAIN (192)..(265): Bacterial regulatory helix-turn-helix protei domain identified by PFam, accession name HTH_1, E-value=8.1e-12, PFam score of 50.9
AKPALPPIRAIWRVAMRLLDAVVETITPEGKTRSITLADFYHPPGKTPHIETALLPGELIVAVTLPPPLGGKHIYRKVRDRASYAFALVSVAAIIQPDGSGRGTLWFPVSSLNGVHSIAIGYQLKTSRVFHSAPLFAVPEPLVTKSCKGNDGRLPIVSLEAVQSEFISSPGSWPQAMRRLCEQQLVTHQSVDIEEIFSQLTEATRKLQARSAKGALTVSLLPSFAIHWLVPRLSSFNSAYPGIDVRIQAVDRQEDKLADDVDVAIFYGRGNWPGLRVEKLYAEYLLPVCSPLLLTGEKPLKTPEDLAKHTLLHDASRRDWQTYTRQLGLNHINVQQGPIFSHSAMVLQAAIHGQGVALANNVMAQSEIEAGRLVCPFNDVLVSKNAFYLVCHDSQAELGKIAAFRQWILAKAAAEQEKFRFRDPISQQPTLDANLEDLLPVRWYSHLHIRRRRYGEIGRDTGTVLVVIAESTAKLSHETTACSCMPLPFIAVRLSVCVTGTEQGDKGGGKANSRAVLFPPSLLQPVRLLSCTHTCARTHMHTRVNAGYWPHQFLLSCGDRFPGSSGPDWVSAAAAAATNAAYVGLGAGVVDSGSRRVWEPLRVFGKRRSPYDTRVDSSNGPFGGKARVNPGPPMNLVPEPSLEEGINPTVPYGLGQHPFSGGKHDAIDVIGRTSHEVTGAITQGTCVTLKSNLDLVNGYEVELCLCCHGYVSVNKKRQRRWLAYEVIKRVWEGEMLVVNDSESAGEGVAQNASVINIVACSCVIPGRHIQASRASRACSGVIFIVQKASPCETVKMTAVHQAWRATRLTGATEDKLTRGSSLNCREVRHPVGQTRRSRRIRHPTPEPVA

SEQ ID NO: 59555 - protein, 391 aa, Homo sapiens
  DOMAIN (94)..(118): Heptosyltransferase domain identified by eMATRIX, accession number PF01075B, p-value=9.654e-23, raw score of 14.32
  DOMAIN (3)..(150): Heptosyltransferase domain identified by PFam, accession name Heptosyltranf, E-value=0.00015, PFam score of -18.0
MQRSCTGEEWYPSIFEESRWYKLGLAAYNRELKKQWLIQEKVLLFFYDKWGAPHEEERAKRLAEGFAYVEVLPKMSLEGVARVLAGAKFVVSVDTGLSHLTAALDRPNITVYGPTDPGLIGGYGKNQMFFYFGIESGADPTIETDSGYNSMDLAVALGYRRLTISCVVPIAHFFDYPRDCVFMFSGLLIILVPLIVGYLIPLRQQAALKVINQVLSWMVYLILFFMGISLAFLDNLASNLLAILHYSAVSITVILLCNIAALMWLERGLPWRNHHQQEKLPSRIAMALESLKLCGVVVIGFAIGLSGLAFLQHATEASEYTLILLLFLVGIQLRNNGMTLKQIVLNRRGMIVAVVVVVSSLIGGLINAFILDLPINTALAMASGFGWYSLS

SEQ ID NO: 59556 - protein, 328 aa, Homo sapiens
  misc_feature (1)...(328): Xaa = X or * as defined in Table 2
MKVTFEQLKAAFNRVLISRGVDSETADACAEMFARTTESGVYSHGVNRFPRFIQQLENGDIIPDAQPKRITSLGAIEQWDAQRSIGNLTAKKMMDRAIELAADHGIGLVALRNANHWMRGGSNGWQAAEKGYIGICWTNSIAVMPPWVPKECRIGTNPLIVAIRSTPITMVDMSMIKHTLPQRAAGTDRKLAMSREAQLLERHGYAFNELDLGKREPVTEEEKLFVAVCRGEREPVTEAERVWSKYMTRIKRPKRFHTLSGGKPQPGKKIVIRPLPGLPVIRDLVVDMGQFYAQYEKIKPVPVEXWTKSASSRAFTDARAARKTRRAV

SEQ ID NO: 59557 - protein, 92 aa, Homo sapiens
  misc_feature (1)...(92): Xaa = X or * as defined in Table 2
THQPARRFPAYHYAHPAAAAAPGDPLGADLQLCARHYHRQRHCVPRHAGYPRSDGLHPQPRGRWRIRCSDCLRVPSDRGDAGDYFHLXLADR

SEQ ID NO: 59558 - protein, 112 aa, Homo sapiens
IHQYRTRTTRTHQVKCLLQHARHQRRFTNCNRHFADRFSNCFNIYGLKIFFMQTGARAQRMERLAQEHGGLQITRPKRLAEGFAYVEVLPKMSLEGVARVLAGAFLIQQGAH

SEQ ID NO: 59559 - protein, 60 aa, Homo sapiens
  misc_feature (1)...(60): Xaa = X or * as defined in Table 2
RPLDVSFMSSFTSNSPLTDLVGYLTFSAIFLSWRLSLLSDAAXTPYPPWGSVHCRRFCSL

SEQ ID NO: 59560 - protein, 425 aa, Homo sapiens
  DOMAIN (360)..(378): TRANSPORT POLYSACCHARIDE PROTEIN OUTER MEMBRANE PRECURSO domain identified by eMATRIX, accession number PD02099C, p-value= 8.096e-10, raw score of 14.81
FHIKLVLTGATWTALPYCHSHVGLRASLKPTPPFWGRAPLGTRPSQQKTECRLINFPETPIFGNSFKYDIEVSNKSPDEEVKLRRHHLARCMKNFKTDIYFVSTFEPSTKSVDLLTVETFAGTVCEYADMPKEWTTTRGLYDPTHLISASCHKVEGLFSFEDRTVATLIRLFIHPVKSMRGIGLTHALADVSGLAFDRIFMITEPDGADIAVKTFTGIRLKVPCPPDHPAFSITNHQTEVTALVVFECDIAVRGSDRLRLSPGPGGSNTDWVIFGLLIKENPGSLLAVGVNLLGKILLSVVAAVSESGQNFLSVLPVRSEGPCFVVIDVDVELPGLRDIADEVKTGVIAVTPAVIPALWEAEVDVNIAAFRSQKAYISGQVNKSGQQAITNDATDYSRGHQKLPCLQSECFHGIYHRIDVARHRA

SEQ ID NO: 59561 - protein, 604 aa, Homo sapiens
  DOMAIN (356)..(380): Heptosyltransferase domain identified by eMATRIX, accession number PF01075B, p-value=9.654e-23, raw score of 14.32
  DOMAIN (187)..(415): Heptosyltransferase domain identified by PFam, accession name Heptosyltranf, E-value=5.4e-31, PFam score of 116.4
  misc_feature (1)...(604): Xaa = X or * as defined in Table 2
STLEDPHYYHIAEVSPVVIIISIYGATGEKYGFITYRCSEHAALSLTKGAALRKRNEPSFQLSYGGLRHFCWPRYTDYGYFELQINRLALFSTNVTAETPYMHLAPPVGTQLPLPHLSHDNSSKNSGGCLPGASVSCNYREPAVRLALASTLPLLRAQSPFFMHKDKDPLFWFLTVPPKWFRKGEVILSSRPRKKTEGSWFPKTFFGFGKSHVLVKEFYNRKHHIAKQQHAVERTRELFCPKGLGYSKPQTQGDYAIAQHFLXTNLPTGCWAKYAVISFMRTDTVDDKHWPEEHLAKNXLGLLADSGIRIKLPWGAPHEEERAKRLAEGFAYVEVLPKMSLEGVARVLAGAKFVVSVDTGLSHLTAALDRPNITVYGPTDPGLIGGAPENGDSDSALYRLRKEMEEFHLVVGSDIFGKHQHGTETDSTTCPSTLEEFETQWFITGGINRILLATDGDFNVGIDDPKSIESMVKKQRESGVTLSTFGVGNSNYNEAMMVRIADVGNGNYSYIDTLSEAQKVLNSEMRQMLITVAKDVKAQIEFNPAWVTEYRQIGYEKRQLRVEHFNNDNVDAGDIGAGKHITLLFELTLNGQKASIDKLRYAPG

SEQ ID NO: 59562 - protein, 663 aa, Homo sapiens
  DOMAIN (30)..(50): LEUCYL-TRNA SYNTHETASE SIGNATURE domain identified by eMATRIX, accession number PR00985D, p-value=7.545e-23, raw score of 15.57
  DOMAIN (284)..(527): Heptosyltransferase domain identified by PFam, accession name Heptosyltranf, E-value=1.6e-112, PFam score of 387.2
RRTRRVGSNLAVHTLKPLHDMDKLDHWPDTVKTMQRNWIGRSEGVEITFNVNDYDNTLTVYTTRPDTFMGCTYLAVAAGHPLAQKAAENNPELAAFIDECRNTKVAEAEMATMEKKGVDTGFKAVHPLTGEEIPVWAANFVLMEYGTGAVMAVPGHDQRDYEFASKYGLNIKPVILAADGSEPDLSQQALTEKGVLFNSGEYTNSSPVYHGAFSERPSGMGDVLHTLPALNDAQQAIPGIKFDWVVEEGFAQIPSWHAAVERVIPVAIRRWRKAWFSAPIKAERKAFREALQAENCDAVIDAQGLVKSAALVTRLAHGVKHGMDWQTAREPLASLFYNRKHHIAKQQHAVERTRELFAKSLGYSKPQTQGDYAIAQHFLTNLPTDAGEYAVFLHATTRDDKHWPEEHWRELIGLLADSGIRIKLPWGAPHEEERAKRLAEGFDYVEVLPKMSLEGVARVLAGAKFVVSVDTGLSHLTAALDRPNITVYGPTDPGLIGGYGKNQMAYGLRITLQQHRLDMADGARRVQPLRTYTDAVHDAVTAEYAECITQTVEAAVSLDKNIINIPNLIEQYGVARAIIETWAAVPLNIATMWGFLILCFIATGTLVNACSYTLAMSTCHEVRDGEKPPLLVRIGWSILGGIIGIVLLALGGLKPIRTAIIAG

SEQ ID NO: 59563 - protein, 594 aa, Homo sapiens
MGIVANQLEKDGHEERREWKRRKSKARHLEGSCDSPMTPWCTIQTRNLQARHLTRPNSKRDHTTIYKNNYQIDFSHPCDRQWVVASSLAKLGFYRLDTQKQNQSQEIAESECRVESEERLEALAHPLSTSSSPSGTSNCSQQLALNTFLQTRSTADLKILLCNRNKNESSSIPPKPLRNMIEQRKSLSADGVKTAVPRHQQTRKTNNHHQQRHEDSFCFTVEPSMAGRINLVRKRFSTLSGKPVAKAEEKDHRRADKHPLPTDTEAVSTTSLLQLHPIKTPASTKNIAAESSALQYASVSYFLYLRATQIPVGITSSTRISRANEPHLYIPYSDRQKRAPPHPQNQAANHRSRNAANPPSTDAVSAYTGALRQQIPFRFTAGRKRDMRIRGKDAHGDGQQTTDEHSTIESTPAQSRSTNMRDTAKFMAHFATRTEALHCPEMRIPAAGYPRIAGRAYGPFAAIGGDHLGGVGDLLREVLASVRPGTCSARVLVTEGISRTLRHRAPGRLLAAAHQTLMSEARTGRASSPFITTLRPAVRLVASRGFAHTYLRHGTLIIANAAAFPSISHIFIAGCVSPLNKNVTPDFSRLISLE

SEQ ID NO: 59564 - protein, 1286 aa, Homo sapiens
  DOMAIN (522)..(560): Peptidase family U32 proteins domain identified by eMATRIX, accession number BL01276D, p-value=6.906e-39, raw score of 18.39
  DOMAIN (750)..(1104): Conserved region in glutamate synthase domain identified by PFam, accession name Glu_synthase, E-value=1.2e-224, PFam score of 759.6
MWLMQGDTCGVGDYQSTMCAAGQRGEALLMNGDDARPVRASDISVLVRSRQEAAQVRDALTLLEIPSVYLSNRDSVFETLEAQEMLWLLQAVMTPERENTLRSALATSMMGLNALDIETLNNDEHAWDVVVEEFDGYRQIWRKRGVMPMLRALMSARNIAENLLATAGANCYKKPERSWQVNMRWYAGYRNISSSQTVMPPANKCVSKVINIWCRLSRSTNRKGWNSHYVSALHRWCAVVAIKKVTPTSTKVRSGVCCKKGNRKMRQGFAPVLKRYAMMILPGKRHKLVITTLAAELNAKTLQRLPGDNWRVTSYSGLQQRVTYRPDYAGSSLMDNLISGKLFRNVALVAKIAAIFQLLDKNVTVSSHRLELLSPARDAAIAREAILHGADAVYIGGPGFGARHNASNSLKDIAELVPFAHRYGAKIFVTLNTILHDDELEPAQRLITDLYQTGVDALIVQDMGILELDIPPIELHASTQCDIRTVEKAKFLSDVGFTQIVLARELNLDQIRAIHQATDATIEFFIHGALCVAYSGQCYISHAQTGRSANRGDCSQACRLPYTLKDDQGRVVSYEKHLLSMKDNDQTANLGALIDAGVRSFKIEGRYKDMSYVKNITAHYRQMLDAIIEERGDLARASSGRTEHGTELIIRRLANYLNPDKKKLAAKGITSVRSRVTNLTELLPGITHEQVCEAITEAFFAHYGERVEAEIISPNKTPDLPNFAETFARQSSWEWNFGRSAEYVHGGVYHAYNPDVVRTLQQAVQSGEYSDYQEYAKLVNERPATTLRDLLAITPGENAVNIADVEPASELFKRFDTAAMSIGALSPEAHEALAEAMNSIGGNSNSGEGGEDPARYGTNKVSRIKQVASGRFGVTPAYLVNADVIQIKVAQGAKPGEGGQLPGDKVTPYIAKLRYSVPGVTLISPPPHHDIYSIEDLAQLIFDLKQVNPKAMISVKLVSEPGAYADLITIAGYDGGTGASPLSSVKYAVCPWDLGLVETQQALVANGLRHKIRLQVDVGLKTGVDIIKAAILGAESFGFGTGPMVALGCKYLRICHLNNCATGVATQDDKLRKNHYHGLPFKVTNYFEFIARETRELMAQLGVTRLVDLIGRTDLLKELDGFTAKQQKLAAVEAAGDCRTASRKESVILNEVLNRFVDALTNEVRYEVSQNWLDTGNLAFLNKPLELTEHEKQWIKQHPNLKVLENPYSPPYSMTDENGSVRGVMGDILNIITLQTGLNFSPITVSHNIHAGTQLSPGGWDIIPGAIYSEDRENNVLFAEAFNTKP

SEQ ID NO: 59565 - protein, 235 aa, Homo sapiens
  DOMAIN (1)..(66): UvrD/REP helicase domain identified by PFam, accession name UvrD-helicase, E-value=2e-06, PFam score of 26.4
MWLMEGESCGVGDYQSTMAQVCAAQIRDWLQAGQRGEALLMNGDDARPVRASDISVLVRSRQEAAQHLLVSRLRLRRYSRLPPAPLHACGPLTVCLAPENLTQQHQVLRTCTAPGVDRLVIVTHHGLQREQIKKTIEATAPGCFEVFIHNDMEAAMKVKSGQLGYYIGACNTGAGAALSIAIAVIGYNKSCTIAKPGIKAKDEHIAKMIAEGKVAFGLSVEHVEHAIPMLINHLK

SEQ ID NO: 59566 - protein, 123 aa, Homo sapiens
  DOMAIN (1)..(93): LysE type translocator domain identified by PFam, accession name LysE, E-value=1.6e-20, PFam score of 81.6
LWWAGASYLCWMGYQMLRGALKKEAVSAPAPQVELPKSGRSFLEAIIYFGSVFSLFVGDNVGTTARWGIFALIIVETLAWFTVVASLFALPQMRRGYQRLAKWIDGFAGALFAGFGIHLIISR

SEQ ID NO: 59567 - protein, 190 aa, Homo sapiens
  DOMAIN (63)..(76): PROTEIN TRANSMEMBRANE INTERGENIC REGION RECQ-PLD domain identified by eMATRIX, accession number PD01736A, p-value=4.522e- 10, raw score of 13.94
  DOMAIN (53)..(157): LysE type translocator domain identified by PFam, accession name LysE, E-value=5.8e-41, PFam score of 149.5
ARSPGSGAINTMTTSLNHGYRGAVASIAGLQTGLAIHIVLVGVGLGTLFSRSVIAFEVLKWAGAAYLIWLGIQQWRAAGAIDLKSLASTQSRRHLFQRAVFVNLTNPKSIVFLAALFPQFIMPQQPQLMQYIVLGVTTIVVDIIVMIGYATLAQRIALWIKGPKQMKALNKIFGSLFMLVGALLASAKHA

SEQ ID NO: 59568 - protein, 191 aa, Homo sapiens
  DOMAIN (1)..(103): LysE type translocator domain identified by PFam, accession name LysE, E-value=3.3e-34, PFam score of 127.1
LWWAGGLYLCWMGYQMLRGALKKEAVSAPAPQVELAKSGRSFLKGLLTNLANPKAIIYFGSVFSLFVGDNVGTTARWGIFALIIVETLAWFTVVASLFALPQMRRGYQRLAKWIDGFAGALFAGFGIHLIISRLALIVPGLLQKNGGWRRMAIISAVIALVCHAIALEARILPDGDSGQNLSLLNVGSLVS

SEQ ID NO: 59569 - protein, 346 aa, Homo sapiens
  DOMAIN (14)..(50): Orn/Lys/Arg decarboxylases family 1 pyridoxal-P attachment si domain identified by eMATRIX, accession number BL00703A, p-value= 1.000e-32, raw score of 21.99
  DOMAIN (12)..(106): Orn/Lys/Arg decarboxylase domain identified by PFam, accession name OKR_DC_1, E-value=2e-58, PFam score of 207.5
MRQYTDEYLDNITPPFTKALFTYVKERKYTFCTPGHMGGTAYQKSPVGCLFYDFFGGNTLKADVSISVTELGSLLDHTGPHLEAEEYIARTFGAEQSYIVTNGTSTDAWRQRFGGTARLYGEKALQLFADAHICVVGIGGVGSWAAEALARTGIGAITLIDMDDVCVTNTNRQIHALRDNVGLAKAEVMAERIRQINPECRVTVVDDFVTPDNVAQYMSVGYSYVIDAIDSVRPKAALIAYCRRNKIPLVTTGCPVYDIFVIAALLGVTTIVVDIIVMIGYATLAQRIALWIKGPKQMKALNKIFGSLFMLGKQAGNDGKPRQRFDNDQRKNAPARGSANVITDKQ

SEQ ID NO: 59570 - protein, 171 aa, Homo sapiens
MVHIQCTYQGIVRFSTNNVNYFHRIPSNITYIISSTCAHNHGRHTSPKSSSDVVITVRSTSIWSTSTSQHDTHASTASVVPHPQLMQYIVLGVTTNVVDIIVMIGYATLAQRIALWIKGPKQMKALNKIFGSLFMLGKQAGNDGKPRQRFDNDQRKNAPARGSANVITDKQ

SEQ ID NO: 59571 - protein, 227 aa, Homo sapiens
  DOMAIN (77)..(113): Orn/Lys/Arg decarboxylases family 1 pyridoxal-P attachment si domain identified by eMATRIX, accession number BL00703A, p-value= 3.118e-29, raw score of 21.99
  DOMAIN (75)..(109): Orn/Lys/Arg decarboxylase domain identified by PFam, accession name OKR_DC_1, E-value=1.4e-17, PFam score of 65.3
PSRVRARYTRRALCEEISKMNENLPLYAFANTYSTLDVSLNDLRLQISFFEYALGAAEDIANKIKQTTDEYINTILPPLTKALFKYVREGKYTFCTPGHMGGTAFQKSPEHAAPVCTSHRLVSYGGAPVAASPRDACRSQYSATAARICCVLDALNSTCDPTHMTHVSRDISVDTRRKPRRQEREGAVTSLGGSDLRTPWLATITQMLTQATSIGSKTMCLPAEYND

SEQ ID NO: 59572 - protein, 74 aa, Homo sapiens
  DOMAIN (37)..(72): Troponin domain identified by eMATRIX, accession number PF00992A, p-value=8.172e-12, raw score of 16.67
KRRQAEYGAQEPSRRIVGGKGSGAQVDEEEEEEEEEEEKEEEKEEEGEEEEEEEEEEEEEEEEEEEEEEEEEED

SEQ ID NO: 59573 - protein, 71 aa, Homo sapiens
IFLLLLPPHHLLLLLLLLLLLLLLLLLLLLLQMIPLEFCRLYRKQGCICFWGSLGEILLMAEGEAGASPSH

SEQ ID NO: 59574 - protein, 97 aa, Homo sapiens
FLLLLLLLLLLLLLLLLLLPLLLLFSSSFLLLSSSFFFFLSSFSFSSFSFSSSPSSPSPSPSFFLLSSSFFGVISLDVVTLAWQSARITGVSHRTQP

SEQ ID NO: 59575 - protein, 215 aa, Homo sapiens
  misc_feature (1)...(215): Xaa = X or * as defined in Table 2
ILGFLRDGNFWRKSQSFFPVHHLLICLLRKSSETMQLTDEHLIHDHPKRPPITELVVPGLHEHLRSNVGDYRCEPPHLTKRNIFCILSEATDITYXLTSISFPGFCFRLTXLLPLTEITGEAVVQIPIKFCPMCFFQSCAKIWTRGMQWHLEAWRCQKPQSPKGGVTALAQEAPKSGLLEGQFMPMPPQYLAVQKKVVWFDVSVDESKLVNRVYG

SEQ ID NO: 59576 - protein, 87 aa, Homo sapiens
  DOMAIN (8)..(41): LacY family proton/sugar symporters proteins domain identified by eMATRIX, accession number BL00896A, p-value=8.000e- 13, raw score of 14.92
LVNYFFFFFFFFFFFFFFFFFFFFFFFLFFFFFLLLLLLLLLLLLLLLLLLLLLLLLLLLLLLQIWDGRKNGTRGGAPGEGRAPPLH

SEQ ID NO: 59577 - protein, 64 aa, Homo sapiens
  DOMAIN (29)..(60): Erythropoietin / thrombopoeitin proteins domain identified by eMATRIX, accession number BL00817A, p-value=3.730e-09, raw score of 18.03
THHPPPPLACVSFYSEQKQWPVLLLLLLLLLLLLLLLLLLLLLLLPLPLPLLLLLLLLLLSSSS

SEQ ID NO: 59578 - protein, 137 aa, Homo sapiens
  DOMAIN (48)..(67): PRION PROTEIN SIGNATURE domain identified by eMATRIX, accession number PR00341H, p-value=1.400e-09, raw score of 1.28
LERLSAPCISLLLSRSLSSLSLSSLLFFFFFFLLLLLLLLLLLLLLLLLLSPPPLLLLLLLLLLLLLLLLLLLLLLLLLLLLLLDPPGDTIQGAPSRGYHPRDTIQGAPSRGHHPGDTIQGVPSRGYHPGGTIQGAP

SEQ ID NO: 59579 - protein, 60 aa, Homo sapiens
  DOMAIN (12)..(58): G-protein coupled receptors family 2 proteins domain identified by eMATRIX, accession number BL00649B, p-value=7.194e- 09, raw score of 20.68
  misc_feature (1)...(60): Xaa = X or * as defined in Table 2
SPLHLSLVXVKQLLLLLLLLLLLLLLLLLLLLLLLLLLLLLLLLLLLLLLLLSSSSFLPS

SEQ ID NO: 59580 - protein, 144 aa, Homo sapiens
  DOMAIN (2)..(35): LacY family proton/sugar symporters proteins domain identified by eMATRIX, accession number BL00896A, p-value=7.395e- 12, raw score of 14.92
  misc_feature (1)...(144): Xaa = X or * as defined in Table 2
SFFFFFFFFFFFFFFFFFFFFFFFCLLLLLLPLLLLLHRKHLICVTLGCLRWLGQLCVRLQGSCAWLQTLGWVHTYACVCTFFLDQQVAGRILLVEDPRSSLLQCCLLLDAPLCCRFQKNMHFIRTXRXVHCSGITSIQFNLEP

SEQ ID NO: 59581 - protein, 93 aa, Homo sapiens
  misc_feature (1)...(93): Xaa = X or * as defined in Table 2
RELLRGGNVYIGPXSILSFFLLLLLLLLLLLLLLLLLLLLLLLLLLLLLLLVNXGVCCTLLSGPEISCRSDFAQGPTPLQGAPQTALGNLASP

SEQ ID NO: 59582 - protein, 87 aa, Homo sapiens
  DOMAIN (2)..(37): Troponin domain identified by eMATRIX, accession number PF00992A, p-value=1.829e-09, raw score of 16.67
TEEEEEEEEEEEEEEEEEEEEEEEEEGEEEERGGGGGKPLNLFFTDEHTLPIISVSGHVSVYCIPYVRGNLDLKECPRDKLEVDLQI

SEQ ID NO: 59583 - protein, 41 aa, Homo sapiens
MDADGVSSASQSTGITDMIHRAQSHRSFLMACFCVLYLCSV

SEQ ID NO: 59584 - protein, 75 aa, Homo sapiens
ALPSYIFPHSSSPPPPPPPLLLLLLLLLLLLLLLLLLLLLLLLLLLLLLLLLLLLLLLLLLLLLPSPVTPHLEET

SEQ ID NO: 59585 - protein, 99 aa, Homo sapiens
  DOMAIN (32)..(61): Integrins alpha chain proteins domain identified by eMATRIX, accession number BL00242E, p-value=4.577e-09, raw score of 9.03
LNEDNVEENWILLLLLLLLLLLLLLLLLLLLLLLLLLLLLLLLLLLLLLLLLLLLLFFFRWSFTLVSQARVTIMNVTVFHLHISSHWKVFRGNVYADCH

SEQ ID NO: 59586 - protein, 577 aa, Homo sapiens
  DOMAIN (59)..(81): OLFACTORY RECEPTOR SIGNATURE domain identified by eMATRIX, accession number PR00245A, p-value=6.333e-23, raw score of 18.03
  DOMAIN (41)..(558): 7 transmembrane receptor (rhodopsin family) domain identified by PFam, accession name 7tm_1, E-value=9.9e-78, PFam score of 249.1
MEPENDTGISEFVLLGLSEEPELQPFLFGLFLSMYLVTVLGNLLIILATISDSHLHTPMYFFLSNLSFADICFISTTIPKMLINIQTQSRVITYAGCITQMCFFVLFGGLDSLLLAVMAYDRFVAICHPLHYTVIMNPRLCGLLVLASWMIAALNSLSQSLMVLWLSFCTDLEIPHFFCELNQVIHLACSDTFLNDMGMYFAAGLLAGGPLVGILCSYSKIVSSIRAISSAQGKYKAFSTCASHLSVVSLFCCTGLELPSPPTTIQGGIHTSTWRLFFQKTSQGFSEKQELQPFLFGLFLSMYLVTVLGNLLIILAAISDSCLHTPMYFFLSNLSFVDICFASTMVPKMLVNIQTQSKVITYAGCITQMCFFVLFIVLDSLLLTVMAYDQFVAICHPLHYTVIMSPQLCGLLVLVSWIMSVLNSMLQSLVTLQLSFCTDLEIPHFFCELNEMIHLACSDTFVNNMVMHFAAVLLDGGPLVGILYSYCRIVSSIRAISSTQGKYKALSTCASHLSVVSIFYGTGLGVYLSSTMTQNLHSTAVASVMYTVVTPMLNPFIYSLRNKDIKGALTQFFRGKQ

SEQ ID NO: 59587 - protein, 86 aa, Homo sapiens
  DOMAIN (41)..(65): RHODOPSIN-LIKE GPCR SUPERFAMILY SIGNATURE domain identified by eMATRIX, accession number PR00237E, p-value=6.559e-09, raw score of 13.03
NLGTAATLFFLFFFFFFFFFFFFFFFFFFFFFFFFFFFFFFFFLFLFLFLVPLLLLLLLLLLLLSSSSCSSPPPSSSSLEKLYLSI

SEQ ID NO: 59588 - protein, 788 aa, Homo sapiens
  DOMAIN (538)..(560): OLFACTORY RECEPTOR SIGNATURE domain identified by eMATRIX, accession number PR00245A, p-value=2.565e-24, raw score of 18.03
  DOMAIN (52)..(769): 7 transmembrane receptor (rhodopsin family) domain identified by PFam, accession name 7tm_1, E-value=2.8e-101, PFam score of 323.9
LPSPPTTIQGGIHTSTWRLFFQKTSQGFSEKQELQPFLFGLFLSMYLVTVLGNLLIILAAISDSCLHTPMYFFLSNLSFVDICFASTMVPKMLVNIQTQSKVITYAGCITQMCFFVLFIVLDSLLLTVMAYDQFVAICHPLHYTVIMSPQLCGLLVLVSWIMSVLNSMLQSLVTLQLSFCTDLEIPHFFCELNEMIHLACSDTFVNNMVMHFAAVLLDGGPLVGILYSYCRIVSSIRAISSTQGKYKALSTCASHLSVVSIFYDRASVSIINHPGRNSYIHMDDTFLPENPSGHINKMKPGNDTRISEFLLLGLSAEPELQPFFFGLFLSMYLVTVLGNLLIILATISDSHLHTPMYFFLSNLSFADISFVSTTVPKMLVNIQTQSRVITYAGCITQMCFFLLFAVLDSLLLAVMAYDRLATEQDSVSKKKKEKKKEEEEEEEEEEEEEEEEEEEEEEEEEEEEEKKRKKRKMPKSHHKMKSWNNTIILEFLLLGISEEPELQAFLFGLFLSMYLVTVLGNLLIILATISDSHLHTPMYFFLSNLSFVDICFVSTTVPKMLVNIQTHNKVITYAGCITQMCFFLLFVGLDNFLLTVMAYDRFVAICHPLHYMVIMNPQLCGLLVLASWIMSVLNSMLQSLMVLPLPFCTHMEIPHFFCEINQVVHLACSDTFLNDIVMYFAVALLGGGPLTGILYSYSKIVSSIRAISSAQGKYKAFSTCASHLSVVSLFYGTCLGVYLSSAATHNSHTGAAASVMYTVVTPMLNPFIYSLRNKHIKGAMKTFFRGKQ

SEQ ID NO: 59589 - protein, 409 aa, Homo sapiens
  misc_feature (1)...(409): Xaa = X or * as defined in Table 2
MEKKSPAYFCCRDMQVIHSDAALQRLLTRFNDPEGWSNLAKNQYLSTSMKQKIWQRALSHRKNNPKADSDAYETSADMILSELISHGEVDDQMLLNATALIRSDDWDFLESALISWDNLPAVVLKELQQNTPRNDIWAKFFLRQENSSRAQVDEALRVYYALDPDALAQLDVLAKRPYKTAAFRGEKTHRVPRRSVRQNIIDQADRLHGAQRLVINTNRTRVVDQLIEFLHHQHVNAHLAEIVRHHQPNRAGTSDRHLNAMVNSRLDVRNNEQTEYKTVRGLTRGLMLLNMLNKLDSTSPCRMLVCCVPRAPPNPGGLNPRAHSLNRSPXNPLKLLSPTGPFEGMRPLGTHFWGGIGHGQGPEWGPQFGLGMNLLVKSLGHWATWVLARAKILRFELGASMMVASTKVP

SEQ ID NO: 59590 - protein, 1334 aa, Homo sapiens
  DOMAIN (487)..(506): LACR BACTERIAL REGULATORY PROTEIN HTH SIGNATURE domain identified by eMATRIX, accession number PR00037B, p-value=7.273e- 15, raw score of 11.84
  DOMAIN (481)..(564): Bacterial regulatory proteins, deoR family domain identified by PFam, accession name deoR, E-value=1.4e-22, PFam score of 83.5
  misc_feature (1)...(1334): Xaa = X or * as defined in Table 2
WQEXVHYIWGVMHGDLGISMKSRIPVWEEFVPRFQATLELGVCAMIFATAVGIPVGVLAAVKRGSIFDHTAVGLALTGYSMPIFWWGMMLIMLVSVHWNLTPVSGRVSDMVFLDDSNPVTGFMLIDTAIWGEDHGTFMGAAPIRILPAYGLGTIPVAGFGRMTRSSMLEVLGEDYIRTARAKGLTRMRVIIVHALRNAMLPVVTVIGLQVGTLLAGAILTETIFSWPGLGRWLIDALQRRDYPVVQGGVLLVATMIILVNLLVDLLYGVVNPRIRHKKRGRRAGLRRHRAKHGRFRRQVQDSFGKEAQERHTLTHEIRNLQQLNAQMAQEAINLTRALKGDNKTQGNWGEVVLTRVLEASGLREGYEYETQVSIENDARSRMQPDVIVRLPQGKDVVIDAKMTLVAYERYFNAEDDYISSSDRSLRRRTAPDSRSMSPAVSGRFKPRVVVAIALDDQQRIVDTLFMKGLTVFARPQKIPAITGTTIRKDLVILEHAGTVIRTYGGVVLNKEESDPPIDHKTLINTHKKELIAEAAYRFADGSLLSRFNNITVMTNSLHIVNALSVTRPLALGFINVWAINMVLHKYILVVIELLANLSVAGNHLLSLYPSLDTGNHPVAYKSDLVLPTSCNTPNRILSDIPPLQRVIIAVAVVIQAGLLIILLPRQADKLLQLMRVLFIQQVAPFIVFCAPFCCPFRADKRQRQAAMVAVVQVDFSRRRVHRVHLVLHLLHGQAARCQPAAAFLTHPVSQDFTFQPVEHLHQHRREHHTATVFADGLLKGIRQAAALRFRQLTGGSFDPDEWREAPRLINRLDAAPGLLYRGQAVAGPARFWTISSSYPFKNFNSATSYSGPAAIRLLRASCGQTSHTNLYQPANNDCYLFDNLSKLGFTQHLMMGHNGQFGGFLKEVRENGGMQSELMDQTNLPVILLGFDGSPVYDDTAVLNRWLDVTEKDKNSRSATFYNTLPLHDGNHYPGVSKTADYKARAQKFFDELDAFFTELEKSGRKVMVVVVPEHGGALKGDRMQVSGLRDIPSPSITATLELGVCAMIFATAVGIPVGVLAAVKRGSIFDHTAVGLALTGYSMPIFWWGMMLIMLVSVHWNLTPVSGRVSDMVFLDDSNPLTGFMLIDTAIWGEDGNFIDAVAHMILPAIVLGTIPLAVIVRMTRSSMLEVLGEDYIRTARAKGLTRMRVIIVHALRNAMLAVVTVIGLQHGDVVGVRELSTNTVNNAFVDFVDAAPAAGYFGGKAHVAGFEDLHTFGSHFIRSPVQVVKPGFDQLAVHALALRVAGNDFRNPFARHLRNARVTFSHKDQHAFSVGKMGEVLGAIFSVIQTSD

SEQ ID NO: 59591 - protein, 508 aa, Homo sapiens
  DOMAIN (223)..(246): Bacterial quinoprotein dehydrogenases proteins domain identified by eMATRIX, accession number BL00363C, p-value=1.155e- 12, raw score of 17.75
FVSNTDTQFQAAGHLLTFAFVHMIPGDPVMIMAGERGISPERHAQLLAELGLNKPMWQQYLHYIWGVMHGDLCISMKSRIPVWEEFVPRFQATLELGVCAMIFATAVGIPVGVLAAVKRGSIFDHTAVGLALTGYSMPIFWWGMMLIMLVSVHWNLTPVSGRVSDMVILDDSNPLTGFMLIDTAIWDTKPGLYEPTSPPIITDKTIVMAGSVTDNFSTRETSGVIRGFDVNTGELLWATCTACTSRVKIGTRWNRCLQNNEQTEYKTVRGLTRGLMLLNMLNKLDGGASVRLMAELSGLHRTTVRRLLETLQEEGYVRRSPSDDSFRLTIKVRQLSEGFRDEQWISALAAPLLGDLLREVVWPTDVSTLDVMHGTWRTSNSIKTTVITSKSTLAIAPESPVISAVVKVTTFSESIRCSIRSGDICKLRKGNISCNLKSLRVSSLLNFGSIEINSLNDAASTPTSAVSAISITTTTIVMATGRCTPRRINHVTSGLRTMAKNSASNSCT

SEQ ID NO: 59592 - protein, 263 aa, Homo sapiens
MGGGITYLLEKAREKSNAKMIVIDPRYTDTAAGREDEWLPIRPGTDAALFFLLASLSLVTHAALCQDIDADFMSRTTMNKFLFAAALIVSGLLVGCNQLTQYTITEQEINQSLAKHNNFSKDIGLPGVADAHIVLTNLTSQIGREEPNKVTLTGDANLDMNSLFGSQKATMKLKLKALPVFDKEKGAIFLKEMEVVDATVQPEKMQTVMQTLLPYLNQALRNYFNQQPAYVLREDGSQGEAMAKKLAKGIEVKPGEIVIPFTD

SEQ ID NO: 59593 - protein, 97 aa, Homo sapiens
  misc_feature (1)...(97): Xaa = X or * as defined in Table 2
FYWNWVPFTNWQNPRLMGQKXHARWLHLRSLLPAMXATLLXRENNRXLLLLTLTSIFKTFRIRRLSVSKPXVKAKKKTRLIIWSTSKFLSCMMLKFT

SEQ ID NO: 59594 - protein, 206 aa, Homo sapiens
TCRPGPGRERLRRMALPMEDEALVLLLIEKMRESGDIHSHHGWLHLPDHKAGFSEEQQAIWQKAEPLFGDEPWWVRDPSAMFSFCCSSSSSSMIGARMVPVQRGGRFIGNQQFWPTGNRHGDHHALAHAAGKLMRVNIQTRCRIGNTDLIQQVNRSLTAGTFVAALMHLNRFHNLETHGVARVKAGHRVLEDHRHFGTHQVAALFF

SEQ ID NO: 59595 - protein, 376 aa, Homo sapiens
  DOMAIN (259)..(283): Aconitase family proteins domain identified by eMATRIX, accession number BL00450D, p-value=8.714e-13, raw score of 21.14
  DOMAIN (254)..(310): Aconitase family (aconitate hydratase) domain identified by PFam, accession name aconitase, E-value=0.007, PFam score of 11.7
MTLPFKPHVLALICSAGLCAASTGLYIKSRTVEAPVEPQSTQLAVSDAAAVTFPATVSAPPVTPAVVKSAFSTAQIDQWVAPVALYPDALLSQVLMASTYPTNVAQAVQWSHDNPLKQGDAAIQAVSDQPWDASVKSLVAFPQLMALMGENPQWVQNLGDAFLAQPQDVMDSVQRLRQLAQQTGSLKSSTEQKVITTTKKAVPVKQGLKNQQSVNGSCMTNIGHFGAAGKLLNAHKVQLPTRLWVAPPTRMNAAQLTEEGYSSVFGKSGARIEIPGCSLCMGNQARVADGATVVSTSTRNFPNRLGTGANVFPGFCGTGGCCGADWQTADAGRVPDLRGAGCDNYINGAMRFRCIAGSRGTHYGLRISARYYRSGK

SEQ ID NO: 59596 - protein, 114 aa, Homo sapiens
  misc_feature (1)...(114): Xaa = X or * as defined in Table 2
FAGIGRSPGEALVLLLIEKMRESGDIHSHHGWLHLPDHKAGFSEEQQAIWQKAEPLFGDEPWWVRDSPGYFALMVRAKFNNCVIVFRRXAQQRHRYTDVVVEIACRIKRVAALA

SEQ ID NO: 59597 - protein, 113 aa, Homo sapiens
HRHRQQRTRPRQTDATRAGKQQKDKATREKNKRETRRRETTERSRRTDEKKRHPQGRKKIIVAAEKVQVTRGGGERRPLPPTAESAPASTGGCCGADWQICRRRKSTRPTWRR

SEQ ID NO: 59598 - protein, 979 aa, Homo sapiens
  DOMAIN (931)..(956): MYELIN P0 PROTEIN SIGNATURE domain identified by eMATRIX, accession number PR00213E, p-value=1.700e-10, raw score of 5.51
  DOMAIN (232)..(465): FG-GAP repeat domain identified by PFam, accession name FG- GAP, E-value=6.2e-55, PFam score of 195.9
YRPPQRHRVGLIQYANNPRVVFNLNTYKTKEEMIVATSQTSQYGGDLTNTFGAIQYARKYAYSAASGGRRSATKVMVVVTDGESHDGSMLKAVIDQCNHDNILRFGIAVLGYLNRNALDTKNLIKEIKAIASIPTERYFFNVSDEAALLEKAGTLGEQIFSIEGTVQGGDNFQMEMSQVGFSADYSSQNDILMLGAVGAFGWSGTIVQKTSHGHLIFPKQAFDQILQDRNHSSYLGYSVAAISTGESTHFVAGAPRANYTGQIVLYSVNENGNITVIQAHRGDQIGSYFGSVLCSVDVDKDTITDVLLVGAPMYMSDLKKEEGRVYLFTIKKGILGQHQFLEGPEGIENTRFGSAIAALSDINMDGFNDVIVGSPLENQNSGAVYIYNGHQGTIRTKYSQKILGSDGAFRSHLQYFGRSLDGYGDLNGDSITDVSIGAFGQVVQLWSQSIADVAIEASFTPEKITLVNKNAQIILKLCFSAKFRPTKQNNQVAIVYNITLDADGFSSRVTSRGLFKENNERCLQKNMVVNQAQSCPEHIIYIQEPSDVVNSLDLRVDISLENPGTSPALEAYSETAKVFSIPFHKDCGEDGLCISDLVLDVRQIPAAQEQPFIVSNQNKRLTFSVTLKNKRESAYNTGIVVDFSENLFFASFSLPVDGTEVTCQVAASQKSVACDVGYPALKREQQVTFTINFDFNLQNLQNQASLSFQALSESQEENKADNLVNLKIPLLYDAEIHLTRSTNINFYEISSDGNVPSIVHSFEDVGPKFIFSLKVTTGSVPVSMATVIIHIPQYTKEKNPLMYLTGVQTDKAGDISCNADINPLKIGQTSSSVSFKSENFRHTKELNCRTASCSNVTCWLKDVHMKGEYFVNVTTRIWNGTFASSTFQTVQLTAAAEINTYNPEIYVIEDNTVTIPLMIMKPDEKAEVPTGVIIGSIIAGILLLLALVAILWKLGFFKRKYEKMTKNPDEIDETTELSS

SEQ ID NO: 59599 - protein, 203 aa, Homo sapiens
SPVSARWQRKILDTLATYHEQHRDEPGPGRERLRRMALPMEDEALVLLLIEKMRESGDIHSHHGWLHLPDHKAGFSEEQQAIWQKAEPLFGDEPWWVRDLAKETGTDEQAMRLTLRQAAQQGIITAIVKDRYYRNDRIVEFANMIRDLDQECGSTCAADFRDRLGVGRKLAIQILEYFDRIGFTRRRGNDHLLRDALLFSGKI

SEQ ID NO: 59600 - protein, 493 aa, Homo sapiens
  misc_feature (1)...(493): Xaa = X or * as defined in Table 2
MFVLADFGHTRRTNRSLGHNILPARIAPDAINKWLSGFFSREVQLRWVGPQMTRRVKRHNTVPLSFADGYPYLLANEASLRDLQQRCPASVKMEQFRPNLVVSGASAWEEDRWKVIRIGDVVFDVVKPCSRCIFTTVSPEKGQKHPAGEPLKTLQSFRTAQDNGGGEGEARAANTGATHRGRHRSPSAVRYRDRLNMYVLRRMDLLYRVKTLWAALRGNHYTWPAIDITLPGNRHFHLIGSIHMGSHDMAPLPTRLLKKLKNADALIVEADVSTSDTPFANLPACEALEERISEEQLQNLQHISQEMGISPSLFSTQPLWQIAMVLQATQAQKLGLRAEYGIDYQLLQAAKQQHKPVIELEGAENQIAMLLQLPDKGLALLDDTLTHWHTNARLLQQMRAGGWSVKEGREKEYFQSPRGWGRSLMPSLGIIIRPPXRKPKNTENRRCISASVTSEKEAPETINQYKAAVRRPFLFLATALAQSEVRVCIAWTN

SEQ ID NO: 59601 - protein, 468 aa, Homo sapiens
  DOMAIN (163)..(197): Bacterial regulatory proteins lysR family proteins. domain identified by eMATRIX, accession number BL00044, p-value=6.571e-18, raw score of 19.03
  DOMAIN (149)..(291): Bacterial regulatory helix-turn-helix protei domain identified by PFam, accession name HTH_1, E-value=2e-45, PFam score of 164.3
SLEQMVPGPGHSCDMDTHAMPPAAKSGSGHQVIWVEGLGGHEEEGEDVIQNRSIGNWIDSVIHWRQQVRQRLADLRFRREAIRRWRGRHCFLMFETRFWCLEKGSHIKNRFAVLNSSNPAGAEAVTVTQRFDIINNRLLTIARAKKVKIHQIRAFVEVARQGSIRGASRMLNMSQPALSKSIQELEEGLAAQLFFRRSKGVTLTDAGESFYQHASLILEELRAAQEDIRQRQGQLAGQINIGMGASISRSLMPAVISRFHQQHPQVKVRIMEGQLVSMTNELRQGELDFTINTYYQGPYDHEFTFEKLLEKQFAIFCRPGHPAIGARSIKQLLDYSWTMPTPHGSYYKQLSELLDDQAQTPQVLELLLANALFQRLAGRQISKRRIAGGNIRLDDQRIGVFELFEQTGGQGSHIVATHMNTANQMKMAIAGEGDIDGRPGVMITAQRGPKRFYPVQQIHTTSLCEISC

SEQ ID NO: 59602 - protein, 606 aa, Homo sapiens; identical to SEQ ID NO: 48075
  DOMAIN (31)..(73): Bacterial regulatory proteins asnC family proteins. domain identified by eMATRIX, accession number BL00519B, p-value=5.500e- 29, raw score of 26.49
  DOMAIN (26)..(128): AsnC family domain identified by PFam, accession name ASNC_trans_reg, E-value=2.3e-22, PFam score of 87.8

SEQ ID NO: 59603 - protein, 47 aa, Homo sapiens
  misc_feature (1)...(47): Xaa = X or * as defined in Table 2
GVYRFPWRFSSAGYGRSGLLVQVEPRLDAXHPGLHEARPGLSSVSSR

SEQ ID NO: 59604 - protein, 103 aa, Homo sapiens
  DOMAIN (84)..(97): w SPAC8A404C RESISTANCE SPAC8A4.05C DAUNORUBICIN. domain identified by eMATRIX, accession number DM00191A, p-value=5.320e- 09, raw score of 8.16
  misc_feature (1)...(103): Xaa = X or * as defined in Table 2
RQLPVSLYVRAVAFENGCFGSCSVGGXGPPAARLGEEQVRGGSSSPCIIRAPRRLHSFLLLLLLLLLLLLLLLLLLLLLLFHLSSSSSFSSTSSSSSCSRSFM

SEQ ID NO: 59605 - protein, 494 aa, Homo sapiens
  DOMAIN (384)..(402): PROSTAGLANDIN D RECEPTOR SIGNATURE domain identified by eMATRIX, accession number PR00854B, p-value=3.919e-11, raw score of 7.30
ILGSLPEQNIYFHGRFSPPLSSAPVLLPSLLLLLGFLPLAFFPLCSFFCLLVSGAAGFPPPLSAPGFLFSPSCLLVLLPPSSSSLRFRTLVASRPSGRSSFRFGFPVPRRRASVFLLFRSPLPFRLPLRSSLPLLLSYSVSLSPPPLLLLCFFSVCSPRLLPLSLLFSLRCLLVSFSCFLCVALRRSSVFLPFCLSLFCAAFRALPLSAPPSFVACPVLRSSSPPVCRVSRRSSVVLPPPCACASPLLFASSVCRSCVPLFFCLSSLCSLPLFLLCACFPALVVSLPRLLFVFPLLFVWLFVLFVACVCVDCLCSSLHSPRRRGAQWPRTCQENKAGAARWNDETAHLAAEGRAEKSPPQPPAPLSCLLVDLPSGPEEAEDHFLARPGLGYCRRRPRSRAPPAAAPCFPPSRLHVQGLAARSRPLTSAPCLPLRPAPMSFSVLPIASILSLPPSVLLLRPPPPPPPPLPPLLLLLLLLHLLLLFLLSLRPRCRA

SEQ ID NO: 59606 - protein, 128 aa, Homo sapiens
PASHRATGPRGKPQRAHGSDGDGSHALGYYHAPIREIRNRKGDYREIRDKRCTSLCSLSHSARAHIHTHLYTHACSARTRTRSLLLPSKYMHRHSMPCNVAGVFVLILHKGRQVCGRVQGRNKQPRAI

SEQ ID NO: 59607 - protein, 47 aa, Homo sapiens; identical to SEQ ID NO: 59603
  misc_feature (1)...(47): Xaa = X or * as defined in Table 2

SEQ ID NO: 59608 - protein, 95 aa, Homo sapiens; identical to SEQ ID NO: 48072
  DOMAIN (20)..(65): Bacterial regulatory proteins asnC family proteins. domain identified by eMATRIX, accession number BL00519C, p-value=1.000e- 29, raw score of 29.50
  DOMAIN (1)..(72): AsnC family domain identified by PFam, accession name ASNC_trans_reg, E-value=1.2e-18, PFam score of 75.4

SEQ ID NO: 59609 - protein, 306 aa, Homo sapiens
  DOMAIN (140)..(185): Bacterial regulatory proteins asnC family proteins. domain identified by eMATRIX, accession number BL00519C, p-value=1.000e- 29, raw score of 29.50
  DOMAIN (89)..(195): AsnC family domain identified by PFam, accession name ASNC_trans_reg, E-value=7.3e-50, PFam score of 179.1
MSLHMVTALIGNSVKNEEVLSFSRMSHKWNHTVSNLLRLASFSMCENRQVVGAFVTDYFDDARQNRNHNNPDDQQLKRYCEDSVQALAEAVNLTTTPCWKRLKRLEDDGILIGKVALLDPEKIGLGLTAFVLIKTQHHSSEWYCRFVTVVTEMPEVLGFWRMAGEYDYLMRVQVADMKRYDEFYKRLLVFPSGMASLSRGCRLACHYRDAATGSAKSGGIVVDGVTEQHLLPVPSSCGAADGCQHADAADEYFVSNGKLSAHRYPVVAYPVNKTQNRLPNFSPAAEYSRYAAIFFAVHDKYRMNDE

SEQ ID NO: 59610 - protein, 25 aa, Homo sapiens
LVLTARQTGQTTVPAQHCPRPPGVE

SEQ ID NO: 59611 - protein, 73 aa, Homo sapiens
LHVLHSGHADAKGGLPWSWAALPLWLCRVQPPSWLLSWAGVEWLQLFWAHGTSCQWIYRSGVWRMVALFSQLH

SEQ ID NO: 59612 - protein, 1541 aa, Homo sapiens
GSCQAYFMLAFGAFADLTPCGIDQGSLHTPEQQLQLYLRPFDQGWNQSRGVLHWGKLTHLGSLDSSELAGRKIKFAGLQRLWPPFPLGAQAQGDQSSAPEPLDGVGVPAGRPSPERRKHQSLDEWTTGAQSHRRRTDPSTVTVSLPTLRDNPFVAPGEESIQTAGRSLAARAAVRRPRLPARRCQPKRSRWLLLDPQVGYRLDSSYCFHCLHLPLSRSLFAQGTPPRESQRQEPSVAMAGASRHPTGTPRQLLVALACLLLSRPALQGRASSLGTEPDPALYLPARGALDGTRPDGPSVLIANPGLRVPLGRSLWLDPLRDLVIGVQPGDRCEVTVLDALPRLKGALSPRRFPCTFGPRQVQYTHFGSHSPGRARVLLQLRYDAPTHTLVLPFTLAVDLVFSQLELVTRNRPLVVEKLRSWSRAIDRRVLDFASLKSGATATRRCRLTPLPHEDGPLPKYGRLVDAVGAPLPRGKGVDCEAFLRAGVRYQHTATSSPNRDYVPMMVELLGPEGQDAGSAGVLVREHFQLLVRIRGGAENTPPRPSFMATMMMEVDPLVLTALTPDALAAEDVESDPGDLVFNILNAPTHPPGHPGQQGYVVSTDDPLGLPVSFFTQQELRELKIAYQPPAENSHGERLFQLELEVVDGDGAASDPFAFMVTVKSMNTLVPVASHNRGLVLFEGQSRPLSSTHSIPISDKDNLEEVKMAAVRGLRHGQLVVFGAPAGCKYFTPADLAAGRVVYQHDGSNTYSDNIIFRMEDGHHQVDFLFPLTILPVDDEPPMVNTNTGLSLTEGQVVQISPFVLSATDIDSEDSTIHFVLENQPLKGNEEEPQWELAPGSSHSGHYLGDLLLQQAELPLSTEDEDWHYMEKEGLYEKVVTEWLQRDIMEGRLFYRHLGPHSPQSVMVQLAFHVQDDHDPPNLSKQHIFTIKVQPVDILSPQLYPGTTLEMTVQEYQLTHFQKNFLRYIDQDSDDQNLWYTLLTLPTDTDGNHQVRAGEIVLTDSPDTLIMHFTQAQVNQHKVAYQPPQKLGIAPRVVQFTYQVEDAAGNSVPGTFTLFLQPVDNQPPEVTNRGFAILEGGSFNLSSNELHVTDPDTDIDQIVFILVRGPQHGHLQYFKRCMVPGESFMQADVINGSVSYQHGRDQTTTSDTFHLEVSDGVHHIPITIPISVHPNVANRSPRISLRSSSLLDVSIDVLENKATEITMGVIHGKRKDVGDLMLSFIVKDSPKLGTILVNGLPTERFTQEDLINGRVAYAHTAGEVGFQKQHDAFSLILSKDSYQWVVGNSIIEKVQVQVTVLPVDNVGPKVFVGESFIVYEGEKNSLTLQHLHVEDVDTHQDELLCTVTSQPASGYLEKIASAPGSKMSQSGSPISAFSLRDIQVRHINYVQSIHKGVEPQEDQFTFYCSDGINFSPNVFFPIIILPTNDEQPKLFAHEFKVLEGMSLVIDTQLLNGADADLPPNELHFQLTALPRHGRIIQQLATGSQPIHSFTLKEIQEASTIVYEHDDSETKEDSFEVWLSDGKHTTHRKVPIVVTLVDD

SEQ ID NO: 59613 - protein, 289 aa, Homo sapiens
MWHQDLATHEAVTTPGCEGAQLGYDCNMDREYGHYLSDCFKIPMAILIRKSRKDQCIEAGRRPRPLAVGDERRGTHSQVVGFLWPQKHVVLSEVLQFCTDISHPVAEKIIAFDELRTDFKSPIDQCNPVHAEHNAEEAMDGVFWQHQLKREQRHGPELEEENATPASMAADFCLDTASHRRLTQRPSLQQRRATAPTQIHFWGCSPTILHKLQIPASRLGKFSCFDPRGKARMHNTMRKKASSIGIHRSQLVSGGEGNQGRRPSLENFQGFVGRARASEPFLPETLDKS

SEQ ID NO: 59614 - protein, 228 aa, Homo sapiens
  DOMAIN (34)..(111): Immunoglobulin domain identified by PFam, accession name ig, E-value=5.1e-05, PFam score of 21.2
MAWVSFYLLPFIFSTGLCALPVLTQPPSASALLGASIKLTCTLSSEHSTYTIEWYQQRPGRSPQYIMKVKSDGSHSKGDGIPDRFMGSSSGADRYLTFSNLQSDDEAEYHCGESHTIDGQVGCVASSELTQLPAVSVALGRTARIICQGDSIGDSDTNSYQQKPGQVPVLVIYGDSNQPSVIPEQFSDCISEDMATLIINGAQDGNKAITVARNSTASHLTVTQHTVK

SEQ ID NO: 59615 - protein, 45 aa, Homo sapiens
EARKMEHGTLLAQPGLWTRDTSWALLYFLCYILPQTAPQVLRIGE

SEQ ID NO: 59616 - protein, 376 aa, Homo sapiens
  DOMAIN (86)..(135): kw TRANSCRIPTASE REVERSE II ORF2 domain identified by eMATRIX, accession number DM01354Z, p-value=8.699e-17, raw score of 9.06
MVVCQHHHKMHCASLYGYTSVRWLHRGFLYQGHALLGLDAPDGHSWTSTGVVSEHVEQRAGWVLLPEAQEASSVTYFQGAYLKIKQKAVYDEAWFTRFAIAKTWKQPRCPSKVDEIKRQCYLYTTKFYAAVRENGITSSAATRMQPCSASTLVWTLHWDPQPGQSLPATFRFCSGVDPALGPPACWSRQFCAQHQDCQGELGAYGQPTPTPNKEMLEALRWTLRYSVSTQYMTPEDKEVVLRRRVSRLNLLTSHPPFTTWSDQRFYTLFTTLEDEEVALSKHSIHDSGGRGGSAQKNTAHEHHYCAITWQRSVNTRLWRTRRERSVSSQYTTLEDKEGALSKHSIHDSGGRGGGAQWRLNPGSGLRLDLGSGLMEE

SEQ ID NO: 59617 - protein, 220 aa, Homo sapiens
  DOMAIN (77)..(122): Interleukin-7 and -9 proteins domain identified by eMATRIX, accession number BL00255B, p-value=9.156e-40, raw score of 24.41
  DOMAIN (17)..(152): Interleukin 7/9 family domain identified by PFam, accession name IL7, E-value=6.3e-47, PFam score of 169.3
PLDLKVSASELQSAVKMLLAMVLTSALLLCSVAGQGCPTLAGILDINFLINKMQEDPASKCHCSANVTSCLCLGIPSDNCTRPCFSERLSQMTNTTMQTRYPLIFSRVKKSVEVLKNNKCPRLLIQKLILGFRVSSGNLPSPGIESNSLDYGREVREERMMADTIEFPGEELSAWPPAEPRDTNKCTVRSTHWTQRAVRKALPLSSGSTGAGAGKNLGRC

SEQ ID NO: 59618 - protein, 66 aa, Homo sapiens
SGFIMCSGKENPDSDADLDVDGDDTLEYGKPQYPWSTMGAEMPSTSNGESSKQEAMQKTCKNSDIE

SEQ ID NO: 59619 - protein, 24 aa, Homo sapiens
  misc_feature (1)...(24): Xaa = X or * as defined in Table 2
RSPRDXLPFKFSDPSLQSLKRGHS

SEQ ID NO: 59620 - protein, 591 aa, Homo sapiens
MTQASGKGGPEDPDSRSPVVGWAIWTEWIVHQIGPVTRKHTLKERGRRNEPVETVIPNFAHKVTSPAQKAPPPLPPKNVPATPPRTGSPLTIGPGNDQSATEVKIEKLPSINDLDSIFGPVLSPKSVAVNAEEKWVHFSDTSPEHVTPELTPREKVVSPPATPDNPADSPAPGPLGPPGPPHTLLPTGSGFIMCSGKENPDSDADLDVDGDDTLEYGKPQYPWSTMGAVAALPARASHLSSLNGPVMSGRSVSCPSVPAEMPSTSYGESSKLEAMHKTCKNSDIEKLPGAAAIGRKGRKGNRKVAVEEPTPEQSLLQLVARPFTQSPDGPNSPMRKVTILIPVLQRRKLKFREGSLPKVSAQGIQSTPLNLAVNWRCEPSSTDLRIDYKYNTDAMTTAVALNNVQFLVPIDGGVTKLQAVLPPAVWNAEQQRILWKIPDISQKSENGGVGSLLARFQLSEGPSKPSPLVVQFTSEGSTLSGCDIELVGAGYRFSLIKKRFAAGNRKQKQSYGGLKEWECVGGRLILGACVHGAEVFLVHAGASAYFNCTNLGKLSFSNCCIHFIFDVIPFYVSKKINSELWIVENISLGFK

SEQ ID NO: 59621 - protein, 60 aa, Homo sapiens
  misc_feature (1)...(60): Xaa = X or * as defined in Table 2
MSENMRCLVFCPCDTLLRMMVSSFIHVPPKDMMSIFSICLSAASISSLXASVCSYPSLNF

SEQ ID NO: 59622 - protein, 56 aa, Homo sapiens
PLSPRQPIGGFFAEGRCEPEAGPRDPEAAFAGPERPRARALLQVPPGRARAAVLLV

SEQ ID NO: 59623 - protein, 246 aa, Homo sapiens; identical to SEQ ID NO: 41753

SEQ ID NO: 59624 - protein, 63 aa, Homo sapiens
  misc_feature (1)...(63): Xaa = X or * as defined in Table 2
QMAQHLPHLVFGSHSGSLWELLSHXVYLLILSLPPPHTPQQAPVWDVPLPVSKCSHCSIPTYK

SEQ ID NO: 59625 - protein, 73 aa, Homo sapiens
  misc_feature (1)...(73): Xaa = X or * as defined in Table 2
IPGSRGKNWVVTGTGQGCHRGPAESDGPAGGARHWEQPPAXYLVLFLCSQRRWPGRQQRGQSGRSWPSVRAAP

SEQ ID NO: 59626 - protein, 84 aa, Homo sapiens
  misc_feature (1)...(84): Xaa = X or * as defined in Table 2
PLQAWGPSLCSXAIGTPSRKPSPSTAHVKHRRLCIPTRRGFSSDNWDPVSSPTCNDARQLHAQVDLEIPVRTCSVWFFVLVIVC

SEQ ID NO: 59627 - protein, 87 aa, Homo sapiens
  misc_feature (1)...(87): Xaa = X or * as defined in Table 2
FAENDGFQLHPCPFFQGSXLLCIGLAHAPLAQRSLLLSTFXCLLLSIHQTHSPSSFCPLLARSCDPLEEKRHSGFRNFQPFCSGFSS

SEQ ID NO: 59628 - protein, 29 aa, Homo sapiens
FAENDGFQLHPCPVEFGCESVWSWTLFGW

SEQ ID NO: 59629 - protein, 395 aa, Homo sapiens
MWRRNKGIVLGMQGELSHGREMRTVWIGWTVHAEMEREIRDMDEAGNHHSQQTIARTKNQTLHVLTHRHLREKIFILPLGQPLSHESLIVVWNPRSNWTAVQAFGLVKSHFFPKDTVSYSRTCPPELFLAAVPVLTGMDYEIYEVRDWGSPGWSGLRAAQQESMGFSLNTCDLSTTRPANGSSWVKGTERWYEVPRRARERKQNRLILILTVHSPPGKTIIRWKCRGATWSLHCPRQYNECAADRAGGRRGERFQDPVASWVMRWGPTVLPRLSDVIVTQLQTQSPTVHCGSHSSGNVRARAAAQGWKLQRLEGGDVAKQMQQNQPDCLKLCLKIGKNREKPVSRSTRCYSPAAQSVVHELAASPPPAEAQVPLPAESESTAHEEPQVVYKHTEV

SEQ ID NO: 59630 - protein, 574 aa, Homo sapiens
  DOMAIN (326)..(351): CAP-Gly domain proteins domain identified by eMATRIX, accession number BL00845, p-value=9.820e-19, raw score of 16.43
  DOMAIN (319)..(367): CAP-Gly domain identified by PFam, accession name CAP_GLY, E- value=1.1e-15, PFam score of 65.6
MAVLWSRIGQAKVLVPVAVYCGSIPRTSAGPRVLPPGSIPSSLPHGEGSLQPEPRALLNNEEPSQLLRGLGQLGGLKLDTPSKGWQARNGHPRNLRALSLGDQPLVLLPSPESEANSVARDTIQIKDKLKKRRLSEGLAASSRASLDPGGGPQGVPLHSTIPRATSQRLLRVPRPMPLIQSIPTTPEASGVKEKGLDLPGSIPGPHELRPGAQEPVTSRPGSPHRPEGPTHANDKGQIPADVVPDPVDMPLEMADAAATAKEIKQMLLDAVPLSCNISKAMLPNYDHVTGKAMLTSLGLKLGDRVVIAGQKVGTLRFCGTTEFASGQWAGIELDEPEGKNNGSVGKVQYFKCAPKYATPQQKGLRPRQAMPIRAPAFLHVAAPPHPVRTSQKTHHRSGSSAGPKEDMGTRDDVPEGADGSELRDLRGCTSVFSAHSAWQEQMLNERLSVSLQEQRCDHQHKKPNRINKVLEVMLAQQGCQVQDQFLKINSFVYISRTWMKRETIILSKLSQGQKTKHRMFSLIGQAHLTVCLEALEQNLHPPGNCLETQQSINNPKYAHYETPSHPESFSHFTT

SEQ ID NO: 59631 - protein, 88 aa, Homo sapiens
  misc_feature (1)...(88): Xaa = X or * as defined in Table 2
MCGIISEGSVLFHWSISLFWYQYHAVLVTVVLXYSLKSGSVMPPALFFWLRIDSAMRALFWFHMNFKVVFSNSVKKVIGSLMGMALNL

SEQ ID NO: 59632 - protein, 436 aa, Homo sapiens
  DOMAIN (56)..(436): TASK K+ channel domain identified by PFam, accession name TWIK_channel, E-value=2.5e-95, PFam score of 330.1
MGQKGGPYKVHHWGQQQIVSTAHDASAPGHPGLYALLHLASMQWSPPSMPPFPLLQNGDDAGTVPGDSGEHQWAVSQSECSAQVPGPERFTYTLSELPPQSHSAGLPLADMVQAQACVCSLCLEAGGYGLNCAPRNSHIEALTSNVTVFGDGAFRRGYGHAAPGTDAGKAFCMFYAVLGIPLTLVMFQSLGERMNTFVRYLLKRIKKCCGMRNTDVSMENMVTVGFFSCMGTLCIGAAAFSQCEEWSFFHAYYYCFITLTTIGFGDYVALQTKGALQKKPLYVAFSFMYILVGLTVIGAFLNLVVLRFLTMNSEDERRDAEERASLAGNRNSMVIHIPEEPRPSRPRYKADVPDLQSVCSCTCYRSQDYGGRSVAPQNSFSAKLAPHYFHSISYKIEEISPSTLKNSLFPSPISSISPGLHSFTDHQRLMKRRKSV

SEQ ID NO: 59633 - protein, 72 aa, Homo sapiens
  misc_feature (1)...(72): Xaa = X or * as defined in Table 2
YSHCSIYTRKIQFLCCPSIKTHLGTNLTSXTFFTXVNIISIYLEASLFFSFLDLGRADKGSSLTGVRSIITK

SEQ ID NO: 59634 - protein, 160 aa, Homo sapiens
MMITLAMLTKNHGYDHSSLWRSTALEPYNLLFVINSIKQEIVNRVQNPRDERGPNMGQKLEILIKDTLVSFLSVRSCRDVRAIRSVAPCDDSCRAIHVCLPTIEVRSLQSNVCRYSVMSSIPSSVRLSSSVDHITYGYWNDHLRNVVVRYSYSVVLRPPS

SEQ ID NO: 59635 - protein, 39 aa, Homo sapiens
SFPKIQGTKNMLFFSYLHRHLCVCVYIYIYIYIYLYISS

SEQ ID NO: 59636 - protein, 104 aa, Homo sapiens
FTIYLQFPGQIIVCRPAAERRELFHFHLPEGKGGERHVLHGSRQESLWRGTPIYKTIRSHETYSLPREEYDRNCPCDSINKTYSLSREQCERNCLRDSIISTCP

SEQ ID NO: 59637 - protein, 212 aa, Homo sapiens
  DOMAIN (130)..(152): TRANSFORMING PROTEIN P21 RAS SIGNATURE domain identified by eMATRIX, accession number PR00449A, p-value=1.466e-09, raw score of 13.20
AEIALLHCSLGDKGRPCFTHLRQPGPAGTRARRRPREERGPGPGSPSRRRRCRSEHVGPGLELAPAALPASRAVAAASPGGRLTLGDAALSQNLSDFADSLVTQRCAPPPPGGSPAPAPERKFRLIERLLKFLLVGDSDVGKGEILESLQDGAAESPYAYSNGKARPAARAATRGPSPASWARSSPAHSSFSSHRIAYLPGSLVWHVPQTGV

SEQ ID NO: 59638 - protein, 811 aa, Homo sapiens
  DOMAIN (169)..(181): VIRAL SPIKE GLYCOPROTEIN PRECURSOR SIGNATURE domain identified by eMATRIX, accession number PR00796G, p-value=2.025e- 09, raw score of 11.47
  DOMAIN (406)..(661): C2 domain identified by PFam, accession name C2, E-value=9.2e -45, PFam score of 162.1
MNSKVPALRKVETKRKYCHIVIRKLKNELLEAKRRSGKTQQEASRVCVHCHRNLGLIFDRGDPCQACSLRVCRECRVAGPNGSWKCTVCDKIAQLRIITGEWFFEEKAKRFKQVNVLGTDVVRQSILRRSPGAEEVQSQEQTRQDAEKSDTSPVAGKKASHDGPKRKGFLLSKFRSATRGEIITPKTDTGRSYSLDLDGQHFRSLKSPPGSDRGSTGSSDLNDQEPGPRTPKKNRNNGVTPGTQSSPAPSTRTVTSVISREYGFENSMDLAAIEGTSQELTKSHRRNTSGTPSIAVSGTSLSSDQSRSELDLSESFTEDSEDTVSIRSKSVPGALDKDSLEETEESIDALVSSQLSTNTHRLASGLSTTSLNSMMSVYSETGDYGNVKVSGEILLHISYCYKTGGLYIFVKNCRNLAIGDEKKQRTDAYVKSYLLPDKSRNNKRKTKIRTGTNPEFNETLKYTISHTQLETRTLQLSVWHYDRFGRNSFLGEVEIPFDSWNFENPTDEWFVLQPKVEFAPDIGLQYKGELTVVLRYIPPEENLMLPPEQLQGNKTFKKGKKKESPVISGGILEVFIKEAKNLTAVKSGGTSDSFVKGYLLPDDSKATKHKTLVIKKSVNPQWNHTFMFSGIHPQDIKNVCLELTIWDKEAFSSNIFLGGVRLNSGSGVSHGKNVDWMDSQGEEQRLWQKMANNPGTPFEGVLMLRSSMGKCLIIGDDEDFTWQASLGKLPSTHQTWCTASVWQSLWGVAVKDSDPLANHALSHIYIPSPVPSFLGPLSEALGKRSSGSSAEILWGENGRVKLMLPLVLDCD

SEQ ID NO: 59639 - protein, 391 aa, Homo sapiens
  DOMAIN (249)..(260): PROTEIN REPEAT MUSCLE CALCIUM-BI domain identified by eMATRIX, accession number PD00301A, p-value=8.200e-09, raw score of 10.24
GPAYRGYGLPVAYDSKMTKNGTVESEEASTLTLDDISDDDIDLDNTEVDEYFFLQPLPTKKRRALLRASGVKKIDVEEKHELRAIRLSREDCGCDCRVFCDPDTCTCSLAGIKCQVDRMSFPCGCTKEGCSNTAGRIEFNPIRVRTHFLHTIMKLELEKNREQQIPTLNGCHSEISAHSSSMGPVAHSVEYSIADSFEIETEPQAAVLHLQSAEELDCQGEEEEEEEDGSSFCSGVTDSSTQSLAPSESDEEEEEEEEEEEEEDDDDDKGDGFVEGLGTHAEVVPLPSVLCYSDGTAVHESHAKNASFYANSSTLYYQIDSHIPGTPNQISENYSERDTVKNGTLSLVPYTMTPEQFVDYARQAEEAYGCLPLTQLANPSVIVCCSSSENG

SEQ ID NO: 59640 - protein, 21 aa, Homo sapiens
LCCSVFLLFCLRGHREIWILW

SEQ ID NO: 59641 - protein, 69 aa, Homo sapiens
  DOMAIN (32)..(42): GLYCOPROTEIN PROTEIN SPIKE E2 PRECURSOR PEPLOMER domain identified by eMATRIX, accession number PD00866L, p-value=3.600e- 12, raw score of 3.73
MAPRPWLWASARWWGQAPCTAATCCSLPGRECCCCCCCCCCCCCCCCCCCCCCCCCWGDHRPFLSFGQA

SEQ ID NO: 59642 - protein, 165 aa, Homo sapiens
  DOMAIN (74)..(87): REPEAT PRECURSOR GLYCOPROTEIN EG domain identified by eMATRIX, accession number PD00120A, p-value=7.000e-12, raw score of 12.94
  misc_feature (1)...(165): Xaa = X or * as defined in Table 2
RGGRRSSTSGKGTAGCPQSPCFCRCSTLRRTAASPGISPPCPKICSCSPLESIWMSNGLCRSCPPSEDSTCGCXGCCCCCCCCCCCCCCCRRRCPSLGSDAGTELETQRPGAGTGPGPTVAPATFLQSRRLMVGAGTPTLGVRTPGFGLQLGFFYWLEDVERDTS

SEQ ID NO: 59643 - protein, 35 aa, Homo sapiens
  DOMAIN (4)..(19): FUNGI-IV METALLOTHIONEIN SIGNATURE domain identified by eMATRIX, accession number PR00874C, p-value=9.031e-11, raw score of 4.37
KSKSSCCCCCCCCCCCCCCCCCCCCCCCCCRRQFL

SEQ ID NO: 59644 - protein, 88 aa, Homo sapiens
  DOMAIN (11)..(64): Granulins proteins domain identified by eMATRIX, accession number BL00799F, p-value=4.568e-10, raw score of 13.26
PVGPLRWAWGEPSSPCCCCCCLGLVSCCCCCCCCCCCCCCCCCCCCWLLCSSSKLAPGGAALAASGCLGPGFWITSRTLWNRFWKAPR

SEQ ID NO: 59645 - protein, 539 aa, Homo sapiens
MHGEGSVALENAAEVSQVEPKILPFWGEHGLPTPISAPLWGSDVGQKDLGPWNQMYVLPVLPLWPSSKQLNLSVPIQNRTPISTPKQASQGLVSVDERLCQGVGQKHNLKPLMDNALFLCLAAVSNLDIESKLSVYYRAPWHQQRNIFLPATRPPCVEELHRHARQSLQALRRAFIVLNAVSAKSYLKASLIKGLVFPLVNHPELAGDEGKILKNSKKTGGGSAGGEESNIGPGASPCRMGPLPRSPELEPRNPALESLLELPSGPSLRRSNVGAEEEKEERVVLFVLGSLMPQKESKGENVGQPTLQATLTVKAQGVATEGKEGCGMRKKSMEDGAPIVLHLPRILLCALLSRPSPHSVELQLISGHGLLTGCTPTARRLSTYSRPKQVQMQPQDLGPVHTSHPEVTGQLPEVPEHDFSHGDSCFCWRKSESKKHVLSTDIQKKHILLTTIANSSLAQKMSDIALNPHNHPMKNTLRQQNKWLIEVLFLRPISPMLGFKSREIAKKQVMEEKRERTIRGIDVARINLSPVLSHSDVTL

SEQ ID NO: 59646 - protein, 199 aa, Homo sapiens
  DOMAIN (56)..(97): Ribosomal protein L11 proteins domain identified by eMATRIX, accession number BL00359B, p-value=5.714e-23, raw score of 23.07
  DOMAIN (13)..(144): Ribosomal protein L11 domain identified by PFam, accession name Ribosomal_L11, E-value=1.3e-60, PFam score of 214.8
MLPKFDPNEIKVVYLRCTGGEVGATSALAPKIGPLGLSPKKVGDDIAKAMGDWKGLRITVKLTIQNRQAQIEVVPSASAMIIKALKEPPRDRKKQKNIKHSGNITFDEIVNIARQMRHQSLARELSGTTKEILGTAQSVGCNVDGRHPHDIIDDINSENDKQPRKSKMRTSFSPQIPGHEHFHYLLLLQHVHCQLALTL

SEQ ID NO: 59647 - protein, 168 aa, Homo sapiens
  DOMAIN (114)..(148): Ribosomal protein L11 proteins domain identified by eMATRIX, accession number BL00359C, p-value=5.929e-16, raw score of 22.18
  DOMAIN (58)..(148): Ribosomal protein L11 domain identified by PFam, accession name Ribosomal_L11, E-value=5.1e-21, PFam score of 79.8
MWNCLTNKLLFQESLQKTATRLSAFSWEEAKVQLSWVVLNLATSAMLPKFYPNEIKVTYLRCTGDEVGATSVLAPKISPLGLSSVKALKEPPRARKKQKTIKHSGNITFDEIVNVAQHMWHRSLARELSGIIKEILGTPQSVGCNVDGCHPHDIIDDINGGAVECPAN

SEQ ID NO: 59648 - protein, 423 aa, Homo sapiens; identical to SEQ ID NO: 37175
  DOMAIN (369)..(403): Ribosomal protein L11 proteins domain identified by eMATRIX, accession number BL00359C, p-value=5.929e-16, raw score of 22.18
  DOMAIN (295)..(402): Ribosomal protein L11 domain identified by PFam, accession name Ribosomal_L11, E-value=1.7e-29, PFam score of 110.2

SEQ ID NO: 59649 - protein, 73 aa, Homo sapiens
  misc_feature (1)...(73): Xaa = X or * as defined in Table 2
PFSSPASSSGRXKTTSFPAKLFNACRISLLASAEVNPNISAYLATWISQIPSCSCRVPSDFLIWSTNRYSIRF

SEQ ID NO: 59650 - protein, 267 aa, Homo sapiens
  DOMAIN (213)..(247): Ribosomal protein L11 proteins domain identified by eMATRIX, accession number BL00359C, p-value=5.929e-16, raw score of 22.18
  DOMAIN (139)..(246): Ribosomal protein L11 domain identified by PFam, accession name Ribosomal_L11, E-value=1.7e-29, PFam score of 110.2
MNDTWLMAEFRQQLFGADQEQRQLIRGSVPRAVPLTNQLASVVTRQLTIQSLWMVTVSAVPARFAKATRVVTSAQQATYRRRGKGLTNKLLFQESLQKTATRLSAFSWEEAKVQLSWVVLNLATSAMLPKFYPNEIKVTYLRCTGDEVGATSVLAPKISPLGLSSEKNREAQIEVVTSASALIIKALKEPPRDRKKQKNIKHSGNITFDEIVNVAQHMWHRSLARELSGIIKEILGTPQSVGCNVDGCHPHDIIDDINGGAVECPAN

SEQ ID NO: 59651 - protein, 236 aa, Homo sapiens
  DOMAIN (90)..(131): Ribosomal protein L11 proteins domain identified by eMATRIX, accession number BL00359B, p-value=6.897e-16, raw score of 23.07
  DOMAIN (119)..(192): Ribosomal protein L11 domain identified by PFam, accession name Ribosomal_L11, E-value=3.9e-16, PFam score of 62.3
  misc_feature (1)...(236): Xaa = X or * as defined in Table 2
GRVGGGGQGANYLRVVPESGVYSTPSRLPPLPPKVRPPTRFKSVYLEVAPKGEVGATSALGPQRIGPLGPVSKKKLGDDISKATGDWKGPXGITVKLTIQNRQAQDXGGCLSASALIIKALKEPPRDRKKQKNIKHSGNITFDEIVNIARQMRHRSLARETLWNHLKRSLGTAQSVGCNVDGRHPHDIIDDINSGAVECPAVSDIFIVTVGVKGGPPSVFTEISWEVLEMVTGGVG

SEQ ID NO: 59652 - protein, 110 aa, Homo sapiens
RAKPRSVKVEEGEASDFSLAWDSSVTAAGGLEGEPECDQKTSRALEDRNSVTSQEERNEDDEDMEDESIYTCDHCQQDFESLADLTDHRAHRCPGGNAKQPQDSDRWLHG

SEQ ID NO: 59653 - protein, 24 aa, Homo sapiens
IDSSSMFCFMLTKEHRQQFEIRVK

SEQ ID NO: 59654 - protein, 66 aa, Homo sapiens
MPRGSTHSFTDEYDGSCTVSRMRLIRLKMFPSIPGLCRVFAVNRGRSVGKCFSTSNDVPIWFSSFC

SEQ ID NO: 59655 - protein, 261 aa, Homo sapiens
FYYLSYVRACFYWLVFLLVSVWACFYWLVFLLVSVWACFYWLVFLLVSVWACFYWLVFLLVSVWACFYWLVFLLVSVWACFYWLVFLLVSVWACFYWLVFLLVSVWACFYWLVFLLVSVWACFYWLVFLLVSVWACFYWLVFLLVSVWACFYWLVFLLVSVWACFYWLVFLLVSVWACFYWLVFLLVSVWACFYWLVFLLGSVWACLYWLVFLLASVWACFYWLVFLLARGGFLPLHRRSGCFCQPFCILLYWVQDFVIFL

SEQ ID NO: 59656 - protein, 78 aa, Homo sapiens
  misc_feature (1)...(78): Xaa = X or * as defined in Table 2
WLRAERAPEGSPETKGSPPPPPRSVLHLSASSPGLRPPEGLXTCRGSPSADSPRRGKHGGKTTHLVSWLSQQKIPMAR

SEQ ID NO: 59657 - protein, 117 aa, Homo sapiens
WYGEDPAMSATTGWQLPPSRSGPASEHLSPHLGAEAAACVADQGWVGAMGKGSYLPPPPGDLGAAHKASPGRPPGSDDGLQEESPCWAKPPYVKSKPACCGPRPRAGGGRSPLATHL

SEQ ID NO: 59658 - protein, 257 aa, Homo sapiens
  DOMAIN (32)..(80): Bacterial chemotaxis sensory transducers proteins domain identified by eMATRIX, accession number BL00538A, p-value=6.000e- 10, raw score of 23.61
  DOMAIN (10)..(79): HAMP domain identified by PFam, accession name DUF5, E-value= 2.8e-11, PFam score of 50.9
MRIETVVLVHRVMALFMALLLVFTIIWLRARLLQPWRQLLAMASAVSHRDFTQRANISGRNEMAMLGTALNNMSAELAESYAVLEQRVQEKTAGLEHKNQILSFLWQANRRLHSRAPLCERLSPVLNGLQNLTLLRDIELRVYDTDDEENHQEFTCQPDMTCDDKGCQLCPRGVLPVGDRGTTLKWRLADSHTQYGILLATLPQGRHLSHDQQQLVDTLVEQLTATLALDRHQERQQQLIVMEERATIARSLHANES

SEQ ID NO: 59659 - protein, 338 aa, Homo sapiens; identical to SEQ ID NO: 45991

SEQ ID NO: 59660 - protein, 855 aa, Homo sapiens
  DOMAIN (183)..(210): PEP-utilizing enzymes phosphorylation site proteins proteins domain identified by eMATRIX, accession number BL00370B, p-value= 5.605e-20, raw score of 18.75
  DOMAIN (162)..(381): PEP-utilizing enzymes domain identified by PFam, accession name PEP-utilizers, E-value=5.5e-104, PFam score of 358.9
MAFNTQHVAIVGQYVVMYQPCTHRAIGIASHRIFHNTNRRREHATIGFVFAWADLEREETIAANLFADSGQRIQRWLQARRTLFQRNTIIIGVRFDSTPMFPASEFAKWAIPKPKLGRQWGDTSSYLQERALDVRDVCFQLLQQIYGEQRFPAPGKLTQPAICMADELTPSQFLELDKNHLKGLLLKSGGTTSHTVILARSFNIPTLVGVDIDALTPWQQQTIYIDGNAGAIVVEPGEAVARYYQQEARVQDALREQQRVWLTQQARTADGIRIEIAANIAHSVEAQAAFGNGAEGVGLFRTEMLYMDRTSAPGESELYNIFCQALESANGRSIIVRTMDIGGDKPVDYLNIPAEAKPFLGYRAVRIYDEFASRVYTQLRANFGPRMLRRSSRVARACGARGVGAGVPAGVFGFFLVGAVLRVPDPSGLVPCRRVRLRFVPVAGRWWLQICIIYRYTGVGTGLVGPPVFPARVSAPLFTRGKLGHANPAPFGDARCQGFRFPWGKSIPALRWNKSNRAPTAWPDPLPERQWEYASPNVWYLLPITAKLMVETEASGWLPAALDECRLMQMRSEIRFHGKTLLALVEKAQTLPEDALPQPMLNLMDMPGYRKAFKAIKSLITDVSETHKISAELLHRVGPLVVRYRTNHHIFLHRFAHVINERDQIPGAFCRLNTGNTRSGKYVAFVVATINNHRQRLAAHGDKGFRPRFTHGFRFGGDIHHVRFASGVDMGQLRHTYFFKCGWKLHGRVRASSCGAMIFSHAVRHALVEPGMAKISVLLATPATARDCNVEVPISSNDNIRNTSPKPSTSRSNNGSNALDVTPLMGWLMPVPAGTAARADVRKPGSVLCAAPFPQ

SEQ ID NO: 59661 - protein, 74 aa, Homo sapiens
  DOMAIN (45)..(71): Flagellar FliJ protein domain identified by PFam, accession name FliJ, E-value=2.2e-12, PFam score of 50.8
  misc_feature (1)...(74): Xaa = X or * as defined in Table 2
NASRMSAGGRTAQNADXLSEXISQXPQQRYECRDNQQPLDQLVEQFIQTLEKAITQHRQQLNQWTQKVDIARRR

SEQ ID NO: 59662 - protein, 123 aa, Homo sapiens
LVPSTLSAIILPNSTWLPLIEQGGGASTNTRRIKSTGLLPAVAINSALVPEPRPYTLVLSPVRLRLSSLQFVAGKGRASCSPPLLRRCPDRASRATGTRRRERRQIRIELDRVTPSEVSSSVS

SEQ ID NO: 59663 - protein, 774 aa, Homo sapiens
  DOMAIN (44)..(74): Gram-negative pili assembly chaperone proteins domain identified by eMATRIX, accession number BL00635E, p-value=7.387e- 15, raw score of 25.34
  DOMAIN (3)..(115): Gram-negative pili assembly chaperone domain identified by PFam, accession name pili_assembly, E-value=7.5e-10, PFam score of 36.7
NMFYFNVREIPPKSNKPIPCKSRCKRVSSCSGDQGAGKGQYEKSVAAQGELTRSGQAFTVNNPTPYYVIISNASAQKNGNPAAGFSPLVIEPKTTVPLNVKMDSVPVLTYVNDFGARMPLFFQCNGNSCQGSQVEFGNMIADNVDGTNYRQDAKYTLNCTNSLANDLRMQLKGNTSTINGETVLSTNITGLGIRIENSADNSLFAVGENSWTPFNINNQPQLKAVPVKASGAQLAAGDAIAHAADEDITFHGTLLSPPTCSISGGKTIEVEFRDLIIDDINGNYGRKEVPYELTCDSTTRHPDWEMTLTWTGTQTSFNDAAIETDVPGFGIELQHDGQRFKLNTPLAINATDFTQKPKLEAYRKSCALVVDGQYLAEVRFPTVSRQDLNVAGQSARVPVVFKLKDCKGPAGYNVKVTLTGVEDSEQPGFLALDTSSTAQGVGIGMEKTDGMQNLTLLRDIELRVYDTDDEENHQEFTCQPDMTCDDKGCQLCPRGVLPVGDRGTTLKWRLADSHTQYGISLATLPQGRHLSHDQQQLVDTLVEQLTAHVALDRHQERQQQLIVMEERATIARELHDSIAQSLSCMKMQVSCSQMQGDALPESSRELLSQIRNELNASWAQLRELLTTFRLQLTEPGLRPALEASCEEYSAKFGFPVKLDYQLPPRLVPSHQAIHLLQIAREALSNALKHSQASEVVVTVAQNDNQVKLTVQDNGCGVPENAIRSNHYGMIIMRDRAQSLRGDCRVRRRESGGTEVVVTFIPEKTFTDVQGDTHE

SEQ ID NO: 59664 - protein, 202 aa, Homo sapiens
RWCVWSLFLQMLEMCPEFLPSGGFVVSLTSGVKLQTFTVNVTAHKGSVDPKRVKLKTLAVSVTALKAACLELFLLPGGFVVFAGFRSEAADLCAEGASSGLGQPREGLPRCSGGLKGSSSAARMGAEAKGAPRASQGCEGRHHAVTSHRSDMGEEEGESQRYLSCPQPSCPINLLQEDASKVIVFAESGINPDSVLDLIMLH

SEQ ID NO: 59665 - protein, 36 aa, Homo sapiens
  misc_feature (1)...(36): Xaa = X or * as defined in Table 2
KYIWNVNLQHSVSMLLXFITSXLSGMDSLFPAAHCV

SEQ ID NO: 59666 - protein, 347 aa, Homo sapiens
MAACPGSILSLSGNPYGQGVENQKTYSQLRVLGKQERTWTDIHYPLKILNGFLVSLTSGVKLQTFTVSVTALKGGATRVVCSSQWVRGLADFRNEAADPHNLLGAHQSSRFHSESCSTWLHLVGHLALTQLGNSCVRLRVMPGEKPIPTFSSRDAFNSCLCKRYTGTQHNPGKCRPNRGPSGNVHFTVYPQTSRCSILPAHKAPQQPPAGGCLFVQKSGSKLLPLINENMLCLQTVLTSGHFSHGSFYPVFRNKEGNKNALLASVVTQATGASSYTDISLFSHWFAQRKRKGKGEKHYLWWGGEGEALRESGERHTCSNIESKVQVATCRSRRNLFQQIHQLSSFPF

SEQ ID NO: 59667 - protein, 290 aa, Homo sapiens
TEGQKNLIVEVTSNDAVRFYPWTIDNKYYSADINLCVVPNKFLVTAEIAESVQAFVVYFDSTQKSGLDSVSSWLPLAKAWLPEVMILVCDRVSEDGINRQKAQEWCIKHGFELVELSPEELPEEDDDFPESTGVKRIVQALNANVWSNVVMKNDRNQGFSLLNSLTGTNHSIGSADPCHPEQPHLPAADSTESLSDHRGGASNTTDAQVDSIVDPMLDLDIQELASLTTGGGDVENFERLFSKLKEMRDKAATLPHEQRKVHAEKVAKAFWMAIGGDRDEIEGLSSDEEH

SEQ ID NO: 59668 - protein, 591 aa, Homo sapiens
MELSDAVIVEGFYFVDPSSPNREIRGERKIGLNVKILQDPENIHHRAAVNANYGISLPYINQRKACVGVQLRQTKLLLYVSAFLDKTQCLIVMLWAAGLQLSPDKNGGPPLNSNKMGLHIPPAIKVSKLIKGSNISSLTVLPSSHCTDPYFTPIPVLQADAHKGILSMIERGLIPPTARITFQNPPITPRAAPLHSFDEARKIPTVAQFLMGHSTQSVACGLGTPAIEDYDRTIYLDCYINKIESSTLAIQFNRHNKIPPRKKKGGRRMERGEEKERKEYLIMPEGASLMTTRVRSDLRKAKGCQSHLTLKGLPKIEVKYSIFIKPVFYLTFITEDGCTKKGGILNYNTGMIVYKGNGDPADVEDYRNQGFSLLNSLTGTNHSIGSADPCHPEQPHLPAADSTESLSDHRGGASNTTDAQVDSIVGLLQRCSGTIMEDWASKMYHKGLELSSQSDSVDGQMRAVISTDDWGQGVSGIGSFQWVLGLIDFKNEAVNPRCECPEFLPSGGFVVSLTSGVKLQTFAVSVTALKGGVSGVVCSSQWVLGLADFRNEAADPHGKGQVLEEVTFTGRGKGTCESLICKCAWPDKDER

SEQ ID NO: 59669 - protein, 341 aa, Homo sapiens
  DOMAIN (67)..(98): Inositol monophosphatase family proteins domain identified by eMATRIX, accession number BL00629A, p-value=4.522e-14, raw score of 23.16
MSAAGGLLQAGALPLGSPFMGLDGLDNTFTWKEDVRMFNPNPVLLFQIIRKALTEEKRVSTKTSAADLVTETDHLVEDLIISELRERFPSHREWQMERAFQTALWLLQPEVVFILGDIFDEGKWSTPEAWADDVERFQKMFRHPSHVQLKVVAGNHDIGFHYDFVMVNSVALNGDGCGICSETEAELIEVSHRLNCSREHYPLYRRSDANCSGEDAAPAEERDIPFKENYDVLSREASQKPRLVLSGHTHSACEVHHGGRVPELSVPSFSWRNRNNPSFIMGSITPTDYTLSKCYLPREDVVLIIYCGVVGFLVVLTLTHFGLLASPFLSGLNLLGKRKTR

SEQ ID NO: 59670 - protein, 204 aa, Homo sapiens
  DOMAIN (47)..(78): Inositol monophosphatase family proteins domain identified by eMATRIX, accession number BL00629A, p-value=4.522e-14, raw score of 23.16
GLDGLDNTFTWKEDVRMFNPNPVLLFQIIRKALTEEKRVSTKTSAADLVTETDHLVEDLIISELRERFPSHREWQMERAFQTALWLLQPEVVFILGDIFDEGKWSTPEAWADDVERFQKMFRHPSHVQLKVVAGNHDIGFHYEMNTYKVERFEKVFSSERLFSWKGINFVMVNSVALNGDGCGICSETEAELIEVSHRLNCSRE

SEQ ID NO: 59671 - protein, 324 aa, Homo sapiens
  DOMAIN (120)..(140): INOSITOL PHOSPHATASE SIGNATURE domain identified by eMATRIX, accession number PR00378B, p-value=1.794e-17, raw score of 13.80
  DOMAIN (105)..(140): Inositol monophosphatase family domain identified by PFam, accession name inositol_P, E-value=1.6e-12, PFam score of 48.0
MDGLEAALAPCLPCQLAGSVLCSEGECVDTVKAAVLFSAQCASKIDIKCSCFSTYLCEGSIFGASKDRARFTPLLAFTPLQPHSAEACSLLPTSMRQAGFFHCRFIAEEAAASGAKCVLTHSPTWIIDPIDGTCNFVHRSTEVDTAGCEVQEGEWQMERAFQTALWLLQPEVVFILGDIFDEGKWSTPEGSIFGASKDRARFTPLLAFTPLQPHSAEACSLLPTSMRQVIEIGGTWAEKAIRYALVSRKPQRDDIEICLYFVRKEFSCGQIVREGFGFAMLPRQNTVLIFGQQEGALLREGKLPGTRVLCEICKALHKEGKQFH

SEQ ID NO: 59672 - protein, 113 aa, Homo sapiens
  DOMAIN (34)..(82): Receptor tyrosine kinase class II proteins domain identified by eMATRIX, accession number BL00239B, p-value=2.935e-09, raw score of 25.15
  DOMAIN (1)..(78): Eukaryotic protein kinase domain identified by PFam, accession name pkinase, E-value=7e-17, PFam score of 64.8
VFKAKNRETHEIVALKRVRLDDDDEGVPSSALREICLLKELKHKNIVRLHDVLHSDKKLTLVFEFCDQDLKKYFDSCNGDLDPVLPSLQNLKFLPLPPLQWSPRCQTQKLFLQ

SEQ ID NO: 59673 - protein, 146 aa, Homo sapiens
  DOMAIN (15)..(79): Eukaryotic protein kinase domain identified by PFam, accession name pkinase, E-value=2.6e-19, PFam score of 73.6
  misc_feature (1)...(146): Xaa = X or * as defined in Table 2
PLTCTSRAAAAMHKYEKLEKIGEGTYGTVFKAKNRETHEIVALKRVRLDDDDEGVPSSALREICLLKELKHKNIVRCAGGGCSLPVWPLGGGGGXHWTSVRRTCLAEPFFCPRLHDVLHSDKKLTLVFEFCDQVKGGVWRTVALGR

SEQ ID NO: 59674 - protein, 281 aa, Homo sapiens
  DOMAIN (130)..(146): Protein kinases ATP-binding region proteins domain identified by eMATRIX, accession number BL00107B, p-value=3.118e-09, raw score of 13.31
  DOMAIN (27)..(234): Eukaryotic protein kinase domain identified by PFam, accession name pkinase, E-value=3.8e-29, PFam score of 109.0
MVNRLMVASSFEGNRDEEVGVAIKGQQEKLEKIGEGTYGTVFKAKNWETHEIVALKWVRLDDNDDGVPSSALREICLLKELKHKNIVRLHDLLHSDKKLTLVFKFCHQHLKKYFDSCNDVFFGAKLYSTSIDLWSAGCIFAELANAGWPLFPGNDVDDQLKRIFWLLGMLTKEQWPSMTKLPDYKLYPLYPATTSLVNIVPKLSATGRDLLQNLLKCNPCQCISAEEALQYPYFSDFCPPWAQGPPATSWGLAYLSLRRGGTVGVPIIDNLGPRGTESFTF

SEQ ID NO: 59675 - protein, 291 aa, Homo sapiens
  DOMAIN (111)..(130): TYROSINE KINASE CATALYTIC DOMAIN SIGNATURE domain identified by eMATRIX, accession number PR00109B, p-value=3.291e-11, raw score of 12.27
  DOMAIN (4)..(285): Eukaryotic protein kinase domain identified by PFam, accession name pkinase, E-value=4.1e-71, PFam score of 249.7
MQKYEKLEKIGEGTYGTVFKAKNRETHEIVALKRVRLDDDDEGVPSSALREICLLKELKHKNIVRLHDVLHSDKKLTLVFEFCDQDLKKYFDSCNGDLDPEIVKLLKGLGFCHSRNVLHRDLKPQNLLINRVLLGKKNGELKLADFGLARAFGIPVRCYSAESSKWEVPFGGGLLQVVTLWYRPPDVLFGAKLYSTSIDMWSAGCIFAVILDSVDTLLGTPTEEQWPSMTKLPDYKPYPMYPATTSLVNVVPKLNATGRDLLQNLLKCNPVQRISAEEALQHPYFSDFCPP

SEQ ID NO: 59676 - protein, 309 aa, Homo sapiens
  DOMAIN (199)..(215): Protein kinases ATP-binding region proteins domain identified by eMATRIX, accession number BL00107B, p-value=1.643e-10, raw score of 13.31
  DOMAIN (16)..(309): Eukaryotic protein kinase domain identified by PFam, accession name pkinase, E-value=6.9e-59, PFam score of 209.1
NRGPAGVPAAAAMQKYEKLEKIGEGTYGTVFKAKNRETHEIVALKRVRLDDDDEGVPSSALREICLLKELKHKNIVRLHDVLHSDKKLTLVFEFCDQDLKKYFDSCNGDLDPEIVKSFLFQLLKGLGFCHSRNVLHRDLEAPATWLINREWGSWKLGDFGPGVRAFWGFPVRCYSAEVVSHLWYRSPDVLFGAKLYSTSIDMWSAGCIFAELANAGRPLFPGNDVDDQLKRIFRLLGTPTEEQRPSMTKLPDYKPYPMYPATTSLVNVVPKLNATGRDLLQNLLKCNPVQRISAEEALQHPYFSDFCPP

SEQ ID NO: 59677 - protein, 58 aa, Homo sapiens; identical to SEQ ID NO: 43350
  DOMAIN (17)..(33): CYCLOPHILIN PEPTIDYL-PROLYL CIS-TRANS ISOMERASE SIGNATURE domain identified by eMATRIX, accession number PR00153E, p-value= 7.632e-17, raw score of 9.10
  DOMAIN (2)..(58): Cyclophilin type peptidyl-prolyl cis-tr domain identified by PFam, accession name pro_isomerase, E-value=1.2e-23, PFam score of 84.9

SEQ ID NO: 59678 - protein, 407 aa, Homo sapiens; identical to SEQ ID NO: 57635
  DOMAIN (294)..(334): Cyclophilin-type peptidyl-prolyl cis-trans isomerase signatur domain identified by eMATRIX, accession number BL00170B, p-value= 7.577e-32, raw score of 20.97
  DOMAIN (261)..(407): Cyclophilin type peptidyl-prolyl cis-tr domain identified by PFam, accession name pro_isomerase, E-value=1.2e-75, PFam score of 263.1

SEQ ID NO: 59679 - protein, 288 aa, Homo sapiens; identical to SEQ ID NO: 57876
  DOMAIN (172)..(212): Cyclophilin-type peptidyl-prolyl cis-trans isomerase signatur domain identified by eMATRIX, accession number BL00170B, p-value= 1.310e-30, raw score of 20.97
  DOMAIN (133)..(288): Cyclophilin type peptidyl-prolyl cis-tr domain identified by PFam, accession name pro_isomerase, E-value=2e-85, PFam score of 296.6

SEQ ID NO: 59680 - protein, 471 aa, Homo sapiens
  DOMAIN (47)..(87): Cyclophilin-type peptidyl-prolyl cis-trans isomerase signatur domain identified by eMATRIX, accession number BL00170B, p-value= 2.800e-26, raw score of 20.97
  DOMAIN (4)..(131): Cyclophilin type peptidyl-prolyl cis-tr domain identified by PFam, accession name pro_isomerase, E-value=1.1e-74, PFam score of 259.8
MVNPVFFDITVDGEPLGRISFELFADKVPKTTENFRALSTGQKGFGCKSSCFHRIIPGFMYQGGDFTRHNGTGGKSIHGEKFDDENFILKHTGPGTLSMAIAGPNTKGSQLFIYTAKSEWLDGKHVVFGKLSRGDSLKEPTSIAESSRHPSYRSEPSLEPESFRSPTFGKSFHFDPLSSGSRSSSLKSAQGTGFELGQLQSIRSEGTTSTSYKSLANQTRNGSLSYDSLLTPSDSPDFESVQAGPEPDPPLGYTSPFLSARLAQQREAERHPRLVPTGPTHREPSPVRYDNLSRHIVASLQEREKLLRQSPPLPGREEEPGLGDSGIQSTPGSGHAPRTSSSSDDSKRSPLGKTPLGRPAVPRFGKPDGLRGRGVGSPEPGPTAPYLGRSMSYSSQKAQPGVSETEEVALQPLLTPKDEVQLKTTYSKSNGQPKSLGSASPGPGQPPLSSPTRGGVKKVSGVGGTTYEISV

SEQ ID NO: 59681 - protein, 1042 aa, Homo sapiens; identical to SEQ ID NO: 57505
  DOMAIN (97)..(142): Cyclophilin-type peptidyl-prolyl cis-trans isomerase signatur domain identified by eMATRIX, accession number BL00170C, p-value= 3.813e-29, raw score of 18.49
  DOMAIN (7)..(137): Cyclophilin type peptidyl-prolyl cis- domain identified by PFam, accession name pro_isomerase, E-value=1.1e-72, PFam score of 252.9

SEQ ID NO: 59682 - protein, 23 aa, Homo sapiens
  DOMAIN (5)..(23): Cyclophilin type peptidyl-prolyl cis-tr domain identified by PFam, accession name pro_isomerase, E-value=0.00073, PFam score of 17.1
MVNPTVFFDIAVDGEPLGRVSFE

SEQ ID NO: 59683 - protein, 234 aa, Homo sapiens
  DOMAIN (173)..(186): PROTEIN ZINC-FINGER METAL-BINDI domain identified by eMATRIX, accession number PD00066, p-value=5.800e-14, raw score of 13.92
  DOMAIN (81)..(206): Zinc finger, C2H2 type domain identified by PFam, accession name zf-C2H2, E-value=1.7e-13, PFam score of 58.3
AALLALGPRNPWTLWTPLTPNYPDRQPWTDKHPDLLTCGRCLQTFPLEAITAFMDHKKLGCQLFRGPSRGQGSEREELKALSCLRCGKQFTVAWKLLRHAQWDHGLSIYQTEQRPRRPRSWAWPRWLQPCRQWWGQQLRPRAPVHSGSGLTRRSPTCPVCKKTLSSFSNLKVHMRSHTGERPYACDQCPYACAQSSKLNRHKKTHRQVPPQSPLMADTSQEQASAAPPEPAVHA

SEQ ID NO: 59684 - protein, 533 aa, Homo sapiens
  DOMAIN (313)..(326): PROTEIN ZINC-FINGER METAL-BINDI domain identified by eMATRIX, accession number PD00066, p-value=5.800e-14, raw score of 13.92
  DOMAIN (221)..(502): Zinc finger, C2H2 type domain identified by PFam, accession name zf-C2H2, E-value=5.3e-22, PFam score of 86.5
AAGRRSHSPERARSARPPLVRPPPARLPACPPARSPGPRLMSRRKAGSAPRRVEPAPAANPDDEMEMQDLVIELKPEPDAQPQQAPRLGPFSPKEVSSAGRFGGEPHHSPGPMPAGAALLALGPRNPWTLWTPLTPNYPDRQPWTDKHPDLLTCGRCLQTFPLEAITAFMDHKKLGCQLFRGPSRGQGSGVPIPQKVSSWQLSALTLCLFFLPEREELKALSCLRCGKQFTVAWKLLRHAQWDHGLSIYQTESEAPEAPLLGLAEVAAAVSAVVGPAAEAKSPRASGSGLTRRSPTCPVCKKTLSSFSNLKVHMRSHTGERPYACDQCPYACAQSSKLNRHKKTHRQVPPQSPLMADTSQEQASAAPPEPAVHAAAPTSTLPCSGGEGAGAAATAGVQEPGAPGSGAQAGPGGDTWGAITTEQRTDPANSQKASPKKMPKSGGKSRGPGGSCEFCGKHFTNSSNLTVHRRSHTGERPYTCEFCNYACAQSSKLNRHQPHARHDAWQHPLRVPLLPCALRPASHPGQTTAAEAP

SEQ ID NO: 59685 - protein, 151 aa, Homo sapiens
  DOMAIN (4)..(14): HOMEOBOX SIGNATURE domain identified by eMATRIX, accession number PR00024C, p-value=6.538e-10, raw score of 7.49
  DOMAIN (1)..(14): Homeobox domain identified by PFam, accession name homeobox, E-value=0.0013, PFam score of 20.8
VKTWFQNQRMKSKRWQKNNWLKNSNGVTQGCLVNPTGNLPMWSNQTWNNSTWSNQTQNIQSWSNHSWNTQTWCTQSWNNQAWNSPFYNCGEESLQSCMQFQPNSPASDLEAALEAAGEGLNVIQQTTRYFNTPQTMDLFLNYSMNMQPEDV

SEQ ID NO: 59686 - protein, 42 aa, Homo sapiens
SRLPVSGQGRVFKAGWLWPCHESPVMTWGVAGQFRITSPVLK

SEQ ID NO: 59687 - protein, 181 aa, Homo sapiens
  DOMAIN (97)..(136): 'Homeobox' antennapedia-type protein domain identified by eMATRIX, accession number BL00032B, p-value=7.000e-12, raw score of 10.83
  DOMAIN (94)..(136): Homeobox domain identified by PFam, accession name homeobox, E-value=1.1e-05, PFam score of 28.9
MNPTYAQSLPCSEASNCKESSPTPVTCGPEENYPSLQMSSAEMPHSETVSPLPSAMDLLIQDSPDSSTSPKGKKPTSAEKSTTKKEDKVLVKKQKTRTVFRSTQLCVLNDRFHGQKYLSLQQMQELSNILNLSYKQPPLFLPQGMPGEHDWKPSNVEQPDLEQFNLEQPHPEHPFLEQPLL

SEQ ID NO: 59688 - protein, 350 aa, Homo sapiens
  DOMAIN (149)..(192): 'Homeobox' domain proteins domain identified by eMATRIX, accession number BL00027, p-value=4.273e-21, raw score of 26.43
  DOMAIN (135)..(191): Homeobox domain identified by PFam, accession name homeobox, E-value=1.1e-19, PFam score of 78.8
YFSFWRSYFSNIFQKSLKAALTFFPVHLLNFFLLFLYTNMSVDPACPQSLPCFEASDCKESSPMPVICGPEENYPSLQMSSAEMPHTETVSPLPSSMDLLIQDSPDSSTSPKGKQPTSAENSVAKKEDKVPVKKQKTRTVFSSTQLCVLNDRFQRQKYLSLQQMQELSNILNLSYKQVKTWFQNQRMKSKRWQKNNWPKNSNGVTQKASAPTYPSLYSSYHQGCLVNPTGNLPMWSNQTWNNSTWSNQTQNIQSWSNHSWNTQTWCTQSWNNQAWNSPFYNCGEESLQSCMQFQPNSPASDLEAALEAAGEGLNVIQQTTRYFSTPQTMDLFLNYSVSKKKNFKTGRGDP

SEQ ID NO: 59689 - protein, 92 aa, Homo sapiens; identical to SEQ ID NO: 48961
  misc_feature (1)...(92): Xaa = X or * as defined in Table 2

SEQ ID NO: 59690 - protein, 93 aa, Homo sapiens
  misc_feature (1)...(93): Xaa = X or * as defined in Table 2
VSDHAGTPALVLHPXRQVPLFXGRGKYPSTPSPSPLAELATSARNLTTRPRNACSPGFLPSRVPSVRDPTGNRTVQLTWQPLPEPLELWPKAL

SEQ ID NO: 59691 - protein, 181 aa, Homo sapiens; identical to SEQ ID NO: 46550
  misc_feature (1)...(181): Xaa = X or * as defined in Table 2

SEQ ID NO: 59692 - protein, 348 aa, Homo sapiens
MTRTTRVDLEVVKVVRLRMHLKMELSGPADGYGMAVKESEESGCLPETSRQLYMSSVGLWAWTRHSGVVKVNVPGVIQTELDSQVFTFQLRDIGRLSTFPSSVNDNSTLGVFQLKNLTVSLDSFLHTHAMPTVDAASSVDIWEGGFQVENSKGRLSDYTLTFQGCQTTRRDACLGPSPLAASPAFLGKGQTITDAKLWVTLTVEGKPVPFLINMEATHSTLPSFQGPVSLASITVVGIDGQASKPLKTPQLWFYIQLCHEEAAFLQKLRNCFSCSPVHGSVSGERDRIRQCTEPYDDIFSQEEEECFIKSPISPRLDCTKILQYEHNVLYCPGSNPFPSGNTFANNDS

SEQ ID NO: 59693 - protein, 79 aa, Homo sapiens
  misc_feature (1)...(79): Xaa = X or * as defined in Table 2
LLLDLPAEDXCCLIASEAPXTITDAELXVTLTVEGKSVPFLINTEATHSTLPSFQGPVSLASITVVGIDGQASKPLKNE

SEQ ID NO: 59694 - protein, 295 aa, Homo sapiens
  misc_feature (1)...(295): Xaa = X or * as defined in Table 2
RSKYPNLVSLCPSPLFPRPDLLSLWPNPLFLHPNLLYLCAPIPYFHAPTSYLCTPTPYFHDPTPFPLFWKELATCAGNLATGTRNAGSPGFLLSRVPSVWDPTENRTVQLTWQPLPEPLELWPKAHLTDSFPDLLGLAAEDXHCTIASEAPXTITDAELWVTLTVEGKPFPFLINTEATHSTLPFFQGPVSLASITVVGIDGQASKPLKTPQLWCQHXTIRRFKHSFLVIPTCQVPLLGEDTLTKLSASLTIPGLQLYLIAALLPNPKPPLRPPLVSPDLNPQVXDIGVEWGKGD

SEQ ID NO: 59695 - protein, 326 aa, Homo sapiens
  DOMAIN (88)..(124): Nickel-dependent hydrogenases large subunit proteins domain identified by eMATRIX, accession number BL00507G, p-value=8.800e- 37, raw score of 16.46
  DOMAIN (63)..(166): Nickel-dependent hydrogenases domain identified by PFam, accession name NiFeSe_Hases, E-value=8.9e-69, PFam score of 226.4
NNYPDDKRRYPDVCRWPDKAFTPHPANAHTHSGFGSLFGATTITGISASISASGPCFSSPAAALITNIGKGDHTTFVKPNIPATGEFKGVGFLEAPRGMLSHWMVIKDGIISNYQAVVPSTWNSGPRNFNDDVGPYEQSLVGTPVADPNKPLEVLRTIHSFDPCMAFLGVGNILLTDEAIGVRIVEALEQRYILPDYVEILDGGTAGMELLGDMANRDHLIIADAIVSKKNAPGTMMILRDEEVPALFTNKISPHQLGLADVLSALRFTGEFPKKLTLVGVIPESLEPHIGLTPTVEAMIEPALEQVLAALRESGVEAIPREAIHD

SEQ ID NO: 59696 - protein, 162 aa, Homo sapiens; identical to SEQ ID NO: 43081
  DOMAIN (48)..(88): Cyclophilin-type peptidyl-prolyl cis-trans isomerase signatur domain identified by eMATRIX, accession number BL00170B, p-value= 1.000e-35, raw score of 20.97
  DOMAIN (5)..(162): Cyclophilin type peptidyl-prolyl cis-tr domain identified by PFam, accession name pro_isomerase, E-value=2.4e-80, PFam score of 279.2

SEQ ID NO: 59697 - protein, 164 aa, Homo sapiens
  DOMAIN (48)..(88): Cyclophilin-type peptidyl-prolyl cis-trans isomerase signatur domain identified by eMATRIX, accession number BL00170B, p-value= 8.650e-37, raw score of 20.97
  DOMAIN (5)..(163): Cyclophilin type peptidyl-prolyl cis-tr domain identified by PFam, accession name pro_isomerase, E-value=8.7e-94, PFam score of 325.0
MVNSVVFFDITVDGKPLGRISIKLFADKILKTAENFRALSTGEKGFRYKGSCFHRIIPGFMCQGGDFTRHNGTGDKSIYGEKFDDENLIRKHTGSGILSMANAGPNTNGSQFFICAAKTEWLDGKHVAFGKVKERVNIVEAMEHFGYRNSKTSKKITIADCGQF

SEQ ID NO: 59698 - protein, 166 aa, Homo sapiens
  DOMAIN (121)..(161): Cyclophilin-type peptidyl-prolyl cis-trans isomerase signatur domain identified by eMATRIX, accession number BL00170B, p-value= 4.073e-23, raw score of 20.97
  DOMAIN (59)..(166): Cyclophilin type peptidyl-prolyl cis-tr domain identified by PFam, accession name pro_isomerase, E-value=2.7e-37, PFam score of 131.7
  misc_feature (1)...(166): Xaa = X or * as defined in Table 2
RRAHACARRRRKKEMLGVNVLTSHSSQERMKLTFKKKAVNFADAAAAQGPLLPAMVNPTMFFHIAVDGEPLGCVSFEVRGLESKKXLLIXSIKLCXQIGLFADKVPKTAENFHALSTGEKGFGYKGSCFHRIIPGFMCQGGDFTRHNGTGGKTSKKITIADCGQLE

SEQ ID NO: 59699 - protein, 239 aa, Homo sapiens
  DOMAIN (43)..(70): Cyclophilin-type peptidyl-prolyl cis-trans isomerase signatur domain identified by eMATRIX, accession number BL00170A, p-value= 3.721e-12, raw score of 17.08
  DOMAIN (11)..(214): Cyclophilin type peptidyl-prolyl cis-tr domain identified by PFam, accession name pro_isomerase, E-value=2.2e-14, PFam score of 53.2
  misc_feature (1)...(239): Xaa = X or * as defined in Table 2
NRVLLAMVNPTVFFDIAVDGEPLGRVSFEVRGLDTKKXLLIXSIKLCXQIGLFADKVPKPAENFRALXSIEEKGFGLXGVPCFHRIIPGFYVSRGGDFTPPXMAPGGQVHLMGKKFERXRTSSLKHTGPGHLVPWANAWTQTQMGSQFFICTAKTEWLDGKHVVVLAKVKERHEILWEAMERFWVPGNGKTSKKIISIADCGQLLISFDLCFYLNHQDHSLLCSPLRESTPLPHLLAGS

SEQ ID NO: 59700 - protein, 127 aa, Homo sapiens
  DOMAIN (96)..(112): ATP SYNTHASE C SUBUNIT SIGNATURE domain identified by eMATRIX, accession number PR00124B, p-value=1.000e-15, raw score of 14.66
  DOMAIN (72)..(127): ATP synthase subunit C domain identified by PFam, accession name ATP-synt_C, E-value=2.9e-08, PFam score of 40.9
LCCSPCRRRLLGREEAGEEPTSPVTQYLQPRSPEECKMFACAKLACTPSLIRAGSRVAYRPISASVLSRPEASRTGEGAATVGVAGSGAGIGTVFGSLIIGYARNPSLKQQLFSYAILGFALSEAMG

SEQ ID NO: 59701 - protein, 103 aa, Homo sapiens
EEPTSPVTQYLQPRSPEECKMLACAKLACTPSLIRAGSRVAYTPTSASVLSRPEASRTGEGSTAFNGAQNGALHLIQRELHTSAIRRDIDTWCKFIGCSAATE

SEQ ID NO: 59702 - protein, 76 aa, Homo sapiens; identical to SEQ ID NO: 43937
  DOMAIN (40)..(60): ATP SYNTHASE C SUBUNIT SIGNATURE domain identified by eMATRIX, accession number PR00124A, p-value=2.125e-17, raw score of 8.81

SEQ ID NO: 59703 - protein, 62 aa, Homo sapiens
  misc_feature (1)...(62): Xaa = X or * as defined in Table 2
SAPDLTCNSKTWKNGRIICFHPASLVSLYXQPQLASWTMKKQDENTQEGKSWDSFSRDVIHI

SEQ ID NO: 59704 - protein, 499 aa, Homo sapiens
  DOMAIN (273)..(293): ATP SYNTHASE C SUBUNIT SIGNATURE domain identified by eMATRIX, accession number PR00124A, p-value=2.125e-17, raw score of 8.81
MTSWGSVHYDSDLCIRYKFLLLAALDVLSDSSLVLVPTEVATQKFLPLDTVATFKLFTCWTENQESDLTFKIQKSPVINLDWGEKPDDDFGAQPNKNLGFASSFGIVDALESIRQDIHVHHCGGTKRWRKEPNDNPFIALDTPQSYFTEEENDQQVNFYYREAATDKRPNLTREEAGEEPTSPVTQYLQPRSPEECKMFACAKLACTPSLIRAGSRVAYRPISASVLSRPEASRTGEGSTVFNGAQNGVSQLIQREFQTSAISRDIDTAAKFIGAGAATVGVAGSGAGIGTVFGSLIIGYARTKLGRCIMEQDRQRRGLQEVSCVCKEKTVKNFRTLGDIEECKKLLPALRAPCPIMSARVLFDARPLYPPCRRPAFFSLSLTESPDSEALPQKEGKKGRVGEGEGRQKEALGAIVAVLPPRRPARCGLWEPDWLGRTVSKWLYLDITNLWVESLLKCANTANGKFPAPGPIDRPRAEECGCAERDWRAARLPPQRGIH

SEQ ID NO: 59705 - protein, 187 aa, Homo sapiens
  misc_feature (1)...(187): Xaa = X or * as defined in Table 2
EEPTSSCHPNISSRAVPEECKMFACAKLAMRPPSLIRAGSRVAYRPISASVVISTQRLSRTGEGSTGIXMGPQNGVSQLIPKGSFQTSCNQAGGHLITGCQIYLGAGCLQQXGVGWFLVAGIGNSLLGKPYPLGYGQKTLSPESQQLVPPXCYPGDFALALKLKAMGLFCLMVAFLILFADVTEITA

SEQ ID NO: 59706 - protein, 138 aa, Homo sapiens
  DOMAIN (41)..(88): Ribosomal protein L37e proteins domain identified by eMATRIX, accession number BL01077, p-value=4.165e-13, raw score of 16.34
  DOMAIN (38)..(93): Ribosomal protein L37e domain identified by PFam, accession name Ribosomal_L37e, E-value=0.00034, PFam score of 13.5
WGTLIGEVRDIPWVHMCACLFAGLGDEAMCEGRPRGSMKPVEAEGRSGANQGTMRCCNKSAQREPHLQKSTYGKCGYTAKRKRKYNWSTKAKRRNTTRTGQMRHLTQTFQQFTDPLQDFCFLTMLATDRHSTFAWRIL

SEQ ID NO: 59707 - protein, 159 aa, Homo sapiens
  DOMAIN (65)..(112): Ribosomal protein L37e proteins domain identified by eMATRIX, accession number BL01077, p-value=1.771e-09, raw score of 16.34
  DOMAIN (86)..(117): Ribosomal protein L37e domain identified by PFam, accession name Ribosomal_L37e, E-value=0.0045, PFam score of 3.4
MDTILAKQTLILNTYYDWSKYQVLLSTQPCSEKVSNIKRLATAYLRHNEILGSCMSVIEKVASMQEKKESRGVRTQPEDPMEEEEEKGSQQEKSTCGKCGYAAKRKRKYNWSAKAKRQTTTGTGQMRHLKIVYSKFGHGFCERTPPKPKRAAAAASSSS

SEQ ID NO: 59708 - protein, 99 aa, Homo sapiens
  DOMAIN (3)..(50): Ribosomal protein L37e proteins domain identified by eMATRIX, accession number BL01077, p-value=6.087e-22, raw score of 16.34
  DOMAIN (1)..(58): Ribosomal protein L37e domain identified by PFam, accession name Ribosomal_L37e, E-value=4.3e-08, PFam score of 40.3
  misc_feature (1)...(99): Xaa = X or * as defined in Table 2
PKGTVIDLEKRRQXDGTLLCRRCGSXGLPTFKKSTCGKCGYPAKRKRKYNWSAKAKRRNTFGTGRMRHLKIVYRRFRHGFREGTTPKPKRAAVAASSSS

SEQ ID NO: 59709 - protein, 222 aa, Homo sapiens
MDKAEGEQKRQKEKGKRTRKREGERRGEKKMKLGCVAIFVPGFLPPVRDSAKSQSGYGAARRICVSKGPFAGITPIDRPTSTNTSTRSVTPLQGVDTIHGTHTSSLLSLLPLSLSSCKPRAAEVVTLKKGRGPTLRTRGFAMAMSSGGSGGGVPEQEDSVLFRRGTGQPRDSIKSIRSLELWSAFFYVFSHSVPCEPHPQAPSSSSLGSLIALSGGPAATWQ

SEQ ID NO: 59710 - protein, 114 aa, Homo sapiens
PLMYHEINILPKASASSRESGHMGGGGGIIGGPEGNGGSQHDSKWGGGGGGGGGGPLNFRPGFPGPSLGPGMGGGGGRKEFHGADLGLMLSDLFPGDLEFSLSSVETWLSFSFS

SEQ ID NO: 59711 - protein, 998 aa, Homo sapiens
  DOMAIN (557)..(576): Calreticulin family proteins domain identified by eMATRIX, accession number BL00803B, p-value=7.577e-10, raw score of 17.08
MNNTMAFMDKVNSMQEQMDSVRQVEILRKNQKEILEMENMRTEMKNVFGGLLSASFPEHPAFLSKKIGQVEEQIDKETKNPNGVSSREAKTALDADDRFTLLTAQKPPTEYSKVEGIYTYSLSPSKVSGDDVIEKDSPESPFEVIIDKAAFDKEFKDSYKESTDDFGSWSVHTDKESSEDISETNDKLFPLRNKEAGRYPMSALLSRQFSHTNAALEEVSRCVNDMHNFTNEILTWDLVPQVKQQTDKSSDCITKTTGLDMSEYNSEIPVVNLKTSTHQKTPVCSIDGSTPITKSTGDWAEASLQQENAITGKPVPDSLNSTKEFSIKGVQGNMQKQDDTLAELPGSPPEKCDSLGSGVATVKVALPDDHLKDEMDWQSSALGEITEADSSGESDDTVIEDITADTSFENNKIQAEKPVSIPSAVVKTGEREIKEIPSCEREEKTSKNFEELVSDSELHQDQPDILGRSPASEAACSKVPDTNVSLEDVSEVAPEKPITTENPKLPSTVSPNVFNETEFSLNVTTSAYLESLHGKNVKHIDDSSPEDLIAAFTETRDKGIVDSERNAFKAISEKMTDFKTTPPVEVLHENESGGSEIKDIGSKYSEQSKETNGSEPLGVFPTQGTPVASLDLEQEQLTIKALKELGERQVEKSTSAQRDAELPSEEVLKQTFTFAPESWPQRSYDILERNVKNGSDLGISQKPITIRETTRVDAVSSLSKTELVKKHVLARLLTDFSGLSFPLAHKAEGGGPKSVGRFCWRGERYQVPPDFDRESLLPFRGQAFLRQQMPRAGREAVVHDLIFWRDVKKTGFVFGTTLIMLLSLAAFSVISVVSYLILALLSVTISFRIYKSVIQAVQKSEEGHPFKAYLDVDITLSSEAFHNYMNAAMVHINRALKLIIRLFLVEDLVDSLKLAVFMWLMTYVGAVFNGITLLILAELLIFSVPIVYEKYKDARVLALSRQESHTEVSEKLQGKKQEAPGVGQVQSHCTHAKAAEPA

SEQ ID NO: 59712 - protein, 160 aa, Homo sapiens
GNSDEVLGAGGVKGLERASCRIILFPLPLSRPVSLLTLVPPFARVAMAEPSAATQSHSISSSSFGAEPSAPGGGGSPGACPALGTKSCSSSCADSFVSSSSSQPVSLFSTSQEGLSSLCSDEPSSEIMTSSFLSSSEIHNTGLTILHGEKKPCGKGASLF

SEQ ID NO: 59713 - protein, 297 aa, Homo sapiens
  DOMAIN (274)..(289): Dehydrins proteins domain identified by eMATRIX, accession number BL00315B, p-value=3.308e-09, raw score of 5.59
  misc_feature (1)...(297): Xaa = X or * as defined in Table 2
NSRVDDFVCPRSRRSKRDLIEFSCRIILFPLPSLPPRISFHPSPTLARVRIGGAVRRPHQSHSISSSSFGAEPSAPGGGGSPGSLPRPWGPKSCSSSLCGARSXFFWRDVKNTGLVFGTTLIMLLSLGSFSVSSVVVSYLILGFSSSVHHQLSGIXQSSVIPSCNRKFRKKGHPFQKPNWNVDITLSSKSFSINNMNAAMVHINRALKLIIRLFLVEDLVDSLKLAVFMWLMTYVGAVFNGITLLILAELLIFSVPIVYEKYKTQIDHYVGIARDQTKSIVEKIQAKLPGIAKKKAE

SEQ ID NO: 59714 - protein, 22 aa, Homo sapiens
EALLMNCLIVLSLSHLRCQVEF

SEQ ID NO: 59715 - protein, 56 aa, Homo sapiens
  misc_feature (1)...(56): Xaa = X or * as defined in Table 2
VSSIFFMSMKLGFFFTQVANIISVAWNLVFCIRFLENTVGIVTIXRRCPIPFSWAF

SEQ ID NO: 59716 - protein, 1456 aa, Homo sapiens
  DOMAIN (948)..(959): GUANYLIN PRECURSOR SIGNATURE domain identified by eMATRIX, accession number PR00774C, p-value=6.891e-09, raw score of 11.76
MLFSYLEKYFYVADELSHCVEPEPSQVPGGSSRDRQQGKPPPLPALKAKTSSRSGPYATEIKKSTDDSIFKVLDWFNRSSYSDDNKLIPPTSPRNRVQRKNRPKSQVAVDLVTDDTTLRENGSKTLSPSKIELKPVRSDSPFQAEGDMLVSESCQDNNVNIKSKFMNLSQKGTPKEGPGILQPFESYGTPSQGSKNMDYSQDSKSPGKGNGASPSNSNYSYSVLKESDAENQVPCNTNNIGNLGEEEPKFHAHEENRGHSEVNFDSSTVVKEPGLKDNMNAERKSKVGNTYILKASLEPENIKSTPGVANNGSPWKKPEVQFQQEAGEVPKNQVQREKYKRVSDRISFWEGEKAGAKITHEKPTSSCSQEQPSAKAYQPVKKSQGVSSMDSLSTDQSEYNQAIPKRVVLDEDDQASQLSNSYSSNKSKETKPQIAGPSRYYLSAEQSDKVSLFQNKKNEPIKRSQVADSLPSRRNITLPALQPPSNVGSERHAPLEKDRPLVRESNANFKVMSLKERMDEPNAEQVYNPSQFENLRKFWDLEANSNSKDNDKNITTTSQKNSAPFNRQKHKEFSDIKLSGKNTHEAEVLLSPKKVMAREEMEKLNSKGILQVLPDEITFPLSPLRKYTYQLPGNESSKENVEKNTEGIVTPVFKEEKDYSEQEIQESIIKTNVLSKDCKDTFNDSLQKLLSETSTPAIQPSGGKVHGKQVLEPSVSENRTWPQKTDFGDTEEEVKGPEKIINEHVDKTVVHPKVKRNSLTASLDKLLKEATGTSPSPLQAKLAPVITGTNSKLEEGRFFGKGIEQSHNTSADKREILAPFPVRDETFGNTALLKKAESGECQLSTQNLIQVAAEDSHPLDPTSQLSRKGSFGDVASPPQDMLFPQGAHLVPQARVHPSQMEISETVEKVILPPRPVLNDVSAALQKLCGEVWLSYPAGREVGPGEVNPEFPEAVQPVCSPLNPPGVISPWATMDTIVPDRKDFYSSNVVPDKTHEVGSYLAAQMSPSDQTLSSFASIVAQYGKGLPQEVEEIVRETIVQPKSEFLEFSAGLEKLLKEETETFPSKYESDTGNLSPSKLIGSTEEPRRATSECHPEELKETVEKAEAPLITESAFDAGFEKLLKEITEAPPYQPQVSVREETHEKESSQSEQTRFLGTVPHFYRAASQTSEMKDKSNGLESQVNQCDKMLGGDALVTDLLVDFCGSRSGVEIPRTPQLYVAHEIGTIKTVTPPEDRDSESGVAGGQGTLQEPGFGEASEAISVSRNRQPIPLLMNKENSTKTSKVELTLASPYMKQEKEEEKEGFSESDFSDGNTSSNAESWRNPSKYDFGQMTHLMPPKGIAWPGSEEEPSPVLKTLERSAARKMPSKSLEDISSDSSNSQGFEDSIPNLECSPDYPKDLGISGLEGILKITHFNLPSMQEFSLKPPQQAANPHIRLNASREGESNPLLDSPDCFS

SEQ ID NO: 59717 - protein, 1102 aa, Homo sapiens
  DOMAIN (153)..(179): C2 domain proteins domain identified by eMATRIX, accession number PF00168C, p-value=7.632e-11, raw score of 27.49
  DOMAIN (126)..(216): C2 domain identified by PFam, accession name C2, E-value= 0.00037, PFam score of 27.2
  misc_feature (1)...(1102): Xaa = X or * as defined in Table 2
TDQAKVDNQPEKLVRSAEDVSTVPTQPDNPFSHPDKLKRMSKSVPAFLQDESDDRETDTASESSYQLSRHKKSPSSLTNLSSSSGMTSLSSVSGSVMSVYSGDFGNLEVKGNIQFAIEYVESLKELHVFGAPVEGLNSSGWKKTGVIPYXKGYLLPNKGQMGKKKTLVVKKTLNPVYNEILRYKIEKQILXTQKLNLSIWHRDTFKRNSFLGEVELDLETWDWDNKQNKQLRWYPLKRKAKALQRFQLKAMGNSSQNQHASDSPEGLIKSQILGLAAPYPARKNTETSREAKPSPKGVFRDAVVVLDIDLLNGFDQNADIDVDNEVQIEVVSDGDEELVGNWSKAHHALVSGSVMSVYSGDFGNLEVKGNIQFAIEYVESLKELHVFVAQCKDLAAADVKKQRSDPALHSAWYITGEWLNKRRPIEPVPGEAATDKKYFYVADELSHCVEPEPSQVPGGSSRDRQQGKPPPLPALKAKTSSRSGPYATEIKKSTDDSIFKVLDWFNRSSYSDDNKSFLQHPRGIESKEKTDSKSQVAVDLVTDDTTLRENGSKTLSPSKIELKPVRSDSPFQAEGDMLVSESCQDNNVNIKSKFMNLSQKGTPKEGPGILQPFESYGTPSQGSKNMDYSQDSKSPGKGNGASPSNSNYSYSVLKESDAENQVPCNTNNIGNLGEEEPKFHAHEENRGHSEVNFDSSTVVKEPGLKDNMNAERKSKVGNTYILKASLEPENIKSTPGVANNGSPWKKPEVQFQQEAGEVPKNQVQREKYKRVSDRISFWEGEKAGAKITHEKPTSSCSQEQPSAKAYQPVKKSQGVSSMDSLSTDQSEYNQAIPKRVVLDEDDQASQLSNSYSSNKSKETKPQIAGPSRYYLSAEQSDKVSLFQNKKNEPIKRSQVADSLPSRRNITLPALQPPSNVGSERHAPLEKDRPLVRESNANFKVMSLKERMDEPNAEQVYNPSQFENLRKFWDLEANSNSKDNDKNITTTSQKNSAPFNRQKHKEFSDIKLSGKNTHEAEVLLSPKKVMAREEMEKLNSKGILQVLPDEITFPLSPLRKYTYQLPGNESSKENVEKNTEGIVTPVFKEEKDYSEQEIQESIIKTNV

SEQ ID NO: 59718 - protein, 79 aa, Homo sapiens
WNVSQNNESYLWQTHSQYHTEWAKTGSIPFENWHKTGMPSLTTPIQHSVGISGQGNQAGERNKGYSIRKRGSQIVPVCR

SEQ ID NO: 59719 - protein, 437 aa, Homo sapiens
KMEWKMQGTQKEFQSDPKAFFNTEKPSLFHQSTSSPYVSKSETHQPMTSGSFPINGLHSHSEVLTARPQSMENSPTINEPKDKSSELTRLESVLPRSPADTSRKSRQKTRAVGKTTNPIFNHTMVYDGFRPEDLMEACVELTVWDHYKLTNQFLGGLRIGFGTANSLFRRILNVTKARIAAGLPMAGIPFLTTDLTYRCFVSFPLNTGDLDCETCTITRSGLTGLVIGGLYPVFLAIPVNGGLAARHLPEKIKDDQQLKNMSGQWFYEAKAKRHRDKIHGADIIRASMRKKRPQIAAEQSKDRENGAKESWVNNVNKDAFLPPELAGVVEEPEEDAAPASPRVQSEKTAGRANYTSTCSHLRAALLVASVSPRRASPDTGTFTSPPPPEYQYLMLSSQQPGCLTIRLHSAKKSVIAVSKLAQIERLIFTKVYKKENS

SEQ ID NO: 59720 - protein, 90 aa, Homo sapiens
MDRPLSSSAEAEEELEWQVASRRRKAWAKCRSSWQASETEDLSTEATTQDEEEDEGEDLPGAQLPAAGGRVLLGGNVPNEKIAIWLKDCR

SEQ ID NO: 59721 - protein, 498 aa, Homo sapiens
FREEELEWQVASRRRKAWAKCRSSWQASETEDLSTEATTQDEEEDEEEDLPGAQLPAAGGRGNVPNEKIAIWLKDCRTPLGASLDEQSSSTLKGVLVRNGGSFEDDLSLGAEANHLHESDAQIENCNNILAKERRLQFHQKGRSMNSTGSGKSSGTVSSVSELLELYEEDPEEILYNLGFGRDEPDIASKIPSRFFNSSSFAKGIDIKVFLSAQMQRMEVENPNYALTSRFRQIEVLTTVANAFSSLYSQVSGTPLQRIGSMSSVTSNKETDPPPPLTRSNTANRLMKTLSKLNLCVDKTEKGESSSPSPSAEKGKILNVSVIEESGNKNDQKSQKIMKKKESSSMLATVKEEVSGSSAAVTENADSDRISDEANSNFNQGTENEQSKETQSHESKLGEESGIVESKLDSDFNISSHSELENSSELKSVHISTPEKEPCAPLTIPSIRNIMTQQKDSFDNGRGSKYGGRSSSCSSHLPARSYEVEKRSSVTYCKSAFR

SEQ ID NO: 59722 - protein, 923 aa, Homo sapiens
MEGAKPTLQLVYQAVQALYHDPDPSGKERASFWLGELQRSVHAWEISDQLLQIRQDVESCYFAAQTMKMKIQTSFYELPTDSHASLRDSLLTHIQNLKDLSPVIVTQLALAIADLALQMPSWKGCVQTLVEKYSNDVTSLPFLLEILTVLPEEVHSRSLRIGANRRTEIIEDLAFYSSTVVSLLMTCVEKAGTDEKMLMKVFRCLGSWFNLGVLDSNFMANNKLLALLFEVLQQDKTSSNLHEAASDCVCSALYAIENVETNLPLAMQLFQGVLTLETAYHMAVAREDLDKVLNYCRIFTELCETFLEKIVCTPGQGLGDLRTLELLLICAGHPQYEVVEISFNFWYRLGEHLYKTNDEVIHGIFKAYIQRLLHALARHCQLEPDHEGVPEETDDFGEFRMRVSDLVKDLIFLIGSMECFAQLYSTLKEGNPPWEVTEAVLFIMAAIAKSVDPENNPTLVEVLEGVVRLPETVHTAVRYTSIELVGEMSEVVDRNPQFLDPVLGYLMKGLCEKPLASAAAKAIHNICSVCRDHMAQHFNGLLEIARSLDSFLLSPEAAVGLLKGTALVLARLPLDKITECLSELCSVQVMALKKLLSQEPSNGISSDPTVFLDRLAVIFRHTNPIVENGQTHPCQKVIQEIWPVLSETLNKHRADNRIVERCCRCLRFAVRCVGKGSAALLQPLVTQMVNVYHVHQHSCFLYLGSILVDEYGMEEGCRQGLLDMLQALCIPTFQLLEQQNGLQNHPDTVDDLFRLATRFIQRSPVTLLRSQVVIPILQWAIASTTLDHRDANCSVMRFLRDLIHTGVANDHEEDFELRKELIGQVMNQLGQQLVSQLLHTCCFCLPPYTLPDVAEVLWEIMQVDRPTFCRWLENSLKGLPKETTVGAVTVTHKQLTDFHKQVTSAEECKQVCWALRDFTRLFR

SEQ ID NO: 59723 - protein, 870 aa, Homo sapiens
RNLALAIADLALQMPSWKGCVQTLVEKYSNDVTSLPFLLEILTVLPEEVHSRSLRIGANRRTEIIEDLAFYSSTVVSLLMTCVEKAGTDEKMLMKVFRCLGSWFNLGVLDSNFMANNKLLALLFEVLQQDKTSSNLHEAASDCVCSALYAIENVETNLPLAMQLFQGVLTLETAYHMAVAREDLDKVLNYCRIFTELCETFLEKIVCTPGQGLGDLRTLELLLICAGHPQYEVVEISFNFWYRLGEHLYKTNDEVIHGIFKAYIQRLLHALARHCQLEPDHEGVPEETDDFGEFRMRVSDLVKDLIFLIGSMECFAQLYSTLKEGNPPWEVTEAVLFIMAAIAKSVDPKKPFSNAACHHSLLFGQNITSEISNCEYLPPVLRENNPTLVEVLEGVVRLPETVHTAVRYTSIELVGEMSEVVDRNPQFLDPVLGYLMKGLCEKPLASAAAKAIHNICSVCRDHMAQHFNGLLEIARSLDSFLLSPEAAVGLLKGTALVLARLPLDKITECLSELCSVQVMALKKLLSQEPSNGISSDPTVFLDRLAVIFRHTNPIVENGQTHPCQKVIQEIWPVLSETLNKHRADNRIVERCCRCLRFAVRCVGKGSAALLQPLVTQMVNVYHVHQHSCFLYLGSILVDEYGMEEGCRQGLLDMLQALCIPTFQLLEQQNGLQNHPDTVDDLFRLATRFIQRSPVTLLRSQVVIPILQWAIASTTLDHRDANCSVMRFLRDLIHTGVANDHEEDFELRKELIGQVMNQLGQQLVSQLLHTCCFCLPPYTLPDVAEVLWEIMQVDRPTFCRWLENSLKGLPKETTVGAVTVTHKQLTDFHKQVTSAEECKQVCWALRDFTQVVSIAHTPCTCALSPRNVFFN

SEQ ID NO: 59724 - protein, 348 aa, Homo sapiens
  DOMAIN (257)..(290): Triosephosphate isomerase proteins domain identified by eMATRIX, accession number BL00171C, p-value=6.000e-27, raw score of 14.53
  DOMAIN (127)..(348): Triosephosphate isomerase domain identified by PFam, accession name TIM, E-value=1.2e-108, PFam score of 337.8
SACTAWYTSCNVGFAPSMVVAVVAVATALILLRRIPRLLRLRASSLSGPRPLPDWRHLLLFGRYQGRRLSVEVAPSETAIRFWRSRLQSLTCPQKPILGGHTPVYLRFVYPDRKRQHRYLWHTSAWKFFVGRNWKMNGRKKCLGELIGTQNAATVPADTKVICALATAYNELARQKLAPKIAVAPQNCYKVTNGAFTGEISPGMVKDLGVTKVAHALAERLGVIACIGEKLDEREAGITEKVVFEQTKVIADNVKDWSKVILAYDPVWATGTGKTATPQQAQEVHKKLRGWLKSNISDAVAQSTGIIYGGSVTKATCKELASQPDVAAFLMSGVSLKPEFVDIINAKQ

SEQ ID NO: 59725 - protein, 228 aa, Homo sapiens
  DOMAIN (41)..(92): Triosephosphate isomerase proteins domain identified by eMATRIX, accession number BL00171B, p-value=1.000e-40, raw score of 26.59
  DOMAIN (16)..(228): Triosephosphate isomerase domain identified by PFam, accession name TIM, E-value=2.2e-110, PFam score of 343.2
  misc_feature (1)...(228): Xaa = X or * as defined in Table 2
RLSLVSSHCGTILSSEVVCAPPTAYIDFARQKLDPKIAVAAQNCYKVTNVAFTGEISPGMIKDCGATWVVLGHSERRHVFGESDELIGQKVAHALAEGLREXFACIGEKLDEREAGIHXGRLFFEQTKVIADNVKDWSKVVLAYEPLLAIGTCKTSTPQQAQEVHEKLRGWLKSNVSDAVAQSTRIIYGGSVTGATCKELASQPDVDGFLVGGASLKPEFVDIINAKQ

SEQ ID NO: 59726 - protein, 309 aa, Homo sapiens
MATLDVNEQGCLPGIASGGHLTSDFLLASAKKEGGTLRGDRRRQEHAVREKCHPAAVGEGECGMERRGGRGQRAERQGAPSQWCEGNGSEKTMEKIRERSALPPSALLTPTTTLPQSPKLLGMDPQVSCGPKAAEKWRALLGCQISKVAPGGLEGLRPAPGCRVSPVNPGLRSGRVGASLLDGGGSNTPRTLSFPGPSWDPDGLTMMKRRAAAAVGGALAVGAVPVVLSAMGFTGAGIAASSIAAKMMSAAAIANGGGVSAGSLVATLQSVGAAGLSTSSNILLASVGSVLGACLGNSPSSSLPAEPRG

SEQ ID NO: 59727 - protein, 206 aa, Homo sapiens
  DOMAIN (173)..(202): Mammalian defensins proteins domain identified by eMATRIX, accession number BL00269C, p-value=7.158e-09, raw score of 16.52
  DOMAIN (13)..(206): Keratin, high sulfur B2 protein domain identified by PFam, accession name Keratin_B2, E-value=5.4e-07, PFam score of 29.6
GTHPEPPPSDAMVSSCCGSVCSDQSCGQGLGQESCCRPSCCQTTCCRTTCCRPSCCISSCCRPSCCISSCCKPSCCRTTCCRPSCCISSCFRPSCCISSCCKPSCCRTTCCRPSCCISSCCRPSCCISSCCKPSCCQTTCCRPSCCISSCYRPQCCQPSCCRPACCISSCCHPSCCVSSCRCPFSCPTTCCRTTCFHPICCGSSCC

SEQ ID NO: 59728 - protein, 66 aa, Homo sapiens
HLNFLPDNAGLGIRLPLELGLGSFQVRTEISRKWHGHDPELLPAWRTRAKWTTPSRSAAKVLTSMC

SEQ ID NO: 59729 - protein, 348 aa, Homo sapiens
  DOMAIN (294)..(320): SECRETIN-LIKE GPCR SUPERFAMILY SIGNATURE domain identified by eMATRIX, accession number PR00249E, p-value=7.632e-25, raw score of 14.90
  DOMAIN (127)..(341): 7 transmembrane receptor (Secretin family) domain identified by PFam, accession name 7tm_2, E-value=8.8e-59, PFam score of 208.7
MDRRMWGAHVFCVLSPLPTQVLGHMHPECDFITQLREDESACLQAAEEMPNTTLGCPATWDGLLCWPTAGSGEWVTLPCPDFFSHFSSESGAVKRDCTITGWSEPFPPYPVACPVPLELLAEEESYFSTVKIIYTVGHSISIVALFVAITILVALRRLHCPRNYVHTQLFTTFILKAGAVFLKDAALFHSDDTDHCSFSTVMAMGEGAGQVLCKVSVAASHFATMTNFSWLLAEAVYLNCLLASTSPSSRRAFWWLVLAGWGLPVLFTGTWVSCKLAFEDIACWDLDDTSPYWWIIKGPIVLSVGVNFGLFLNIIRILVRKLEPAQGSLHTQSQYWYCVFVSGDTGKG

SEQ ID NO: 59730 - protein, 440 aa, Homo sapiens
  DOMAIN (153)..(199): G-protein coupled receptors family 2 proteins domain identified by eMATRIX, accession number BL00649B, p-value=9.129e- 33, raw score of 20.68
  DOMAIN (143)..(400): 7 transmembrane receptor (Secretin family) domain identified by PFam, accession name 7tm_2, E-value=1.9e-112, PFam score of 387.0
SSQGLLRLVEGATAGLTMDRRMWGAHVFCVLSPLPTVLGHMHPECDFITQLREDESACLQAAEEMPNTTLGCPATWDGLLCWPTAGSGEWVTLPCPDFFSHFSSESGAVKRDCTITGWSEPFPPYPVACPVPLELLAEEESYFSTVKIIYTVGHSISIVALFVAITILVALRRLHCPRNYVHTQLFTTFILKAGRVFLKDAALFHSDDTDHCSFSTVLCKVSVAASHFATMTNFSWLLAEAVYLNCLLASTSPSSRRAFWWLVLAGWGLPVLFTGTWVSCKLAFEDIACWDLDDTSPYWWIIKGPIVLSVGVNFGLFLNIIRILVRKLEPAQGSLHTQSQYWRLSKSTLFLIPLFGIHYIIFNFLPDNAGLGIRLPLELGLGSFQGFIVAILYCFLNQEVRTEISRKWHGHDPELLPAWRTRAKWTTPSRSAAKVLTSMC

SEQ ID NO: 59731 - protein, 350 aa, Homo sapiens
MPGTCKCTGAEASRIWKGEDVCEYWGQRVVAFLAMVMGTHTYSHWPSCCPSKGQDTSEELLRWSTVPVPPLEPARPNRHPESCRASEDGPLNSRAISPWRYEPDKCRPHRLDRDLNRLPQDLYHARCLCPHCVSLQTGSHMDPRGNSELLYHNQTVFYRRPCHGEKGTHKGYCLERRLYRVSLACGAVLVGPTKMLSARDRRDRHPEEGVVAELQGFAVDKAFLTSHKGILLETELALTLIIFICFTASISAYMAAALLEFFITLAFLFLYATQYYQRFDRINWPWLDFLRCVSAIIIFLVVSFAAVTSRDGAAIAAFVFGIILVSIFAYDAFKIYRTEMAPGASQGDQQ

SEQ ID NO: 59732 - protein, 107 aa, Homo sapiens
NRCLGNSFKCFLCILQVGRAHAFLLCSDFMPCEAVCSSIIYSFIPVTKTQGAAPHTRAHSLTPDPKPSCCCCCCPRPGEDPGHMCVVWPWQPSVIYAKYWTYEHAQW

SEQ ID NO: 59733 - protein, 42 aa, Homo sapiens
  misc_feature (1)...(42): Xaa = X or * as defined in Table 2
RPEPEGRGCXGILGGGGGAGPSGHYALQEAQETSQSGRESQA

SEQ ID NO: 59734 - protein, 184 aa, Homo sapiens
  DOMAIN (140)..(176): TGF-beta family proteins domain identified by eMATRIX, accession number BL00250B, p-value=6.500e-27, raw score of 27.37
  DOMAIN (75)..(176): Transforming growth factor beta like domain identified by PFam, accession name TGF-beta, E-value=2.7e-66, PFam score of 205.3
SRKESLFREIRAQARALGAALASEPLPDPGTGTASPRAVIGGRRRRRTALAGTRTAQGSGGGAGRGHGRRGRSRCSRKPLHVDFKELGWDDWIIAPLDYEAYHCEGLCDFPLRSHLEPTNHAIIQTLLNSMAPDAAPASCCVPARLSPISILYIDAANNVVYKQYEDMVVEACGCRSEMPLGPS

SEQ ID NO: 59735 - protein, 147 aa, Homo sapiens
  DOMAIN (19)..(56): S-100/ICaBP type calcium binding protein domain identified by eMATRIX, accession number BL00303A, p-value=7.787e-12, raw score of 21.77
  misc_feature (1)...(147): Xaa = X or * as defined in Table 2
ALPAPRRKVGLNLAPVTEPRDQPWAMIIDVFSRYSGSEGSTSDPXPKGELKVLMDKELPRLSLQSGKDKDAVDKLLKDPGRPMGDAQGGTFSEVHPCSVAAITSACHKYFEKAGLKLMPWEMFTDFLGQSIGSQGFPKMFCLGIYFP

SEQ ID NO: 59736 - protein, 59 aa, Homo sapiens
  misc_feature (1)...(59): Xaa = X or * as defined in Table 2
FSQQLLGQADXXSFLLGCSRLLTAVSRPKRPGEAGITPRVRCLLSNMKDILVASKFWQL

SEQ ID NO: 59737 - protein, 238 aa, Homo sapiens
PRKTTLAGSEEAGAVEIAPYLCDMFDNKHLTRGVMPASPGRFGLETAVSNLEHPEQKALSVSLPQKLLRKLSAGAVMPPTALFLVKRTFQGCASDEGASRLGLKTYIVSDNQATSTRLPDLGFSAGTSAFDPAKNDPLSRAVLGEHSLEDGIDGFLGLTWNQELAATIDRLESLDRNELRKQFSIKRLNEMEIYPGVTFSEELEGQLFASIMLDMEKLISAYRRMLRQGNHALTVIVG

SEQ ID NO: 59738 - protein, 207 aa, Homo sapiens
QPRRLHSLSGSWHRHFGEPWSLVHSSVPPFLGGGSPQAADLRDLKSQLPPLRRVWRCRMGAAGLGGGSPTLLGAGDRGAAGAQSLPSAAARVPARPPERSPVAAPASLSQDPTVSRVVGFLVLASFDFAVPGISTLRFPMGRRSYPVTRWSPAPGFPWPRIFNHNHPGGSLAPSFLVLARFGFPLVKPALSGQEKFNSWGNLGTNQC

SEQ ID NO: 59739 - protein, 66 aa, Homo sapiens
SNCIDLFLDIHMSIEFSHLASSGIGLFKVSSCSKSGLSVQFPATGFLRRHISSVPPLATFINLLLL

SEQ ID NO: 59740 - protein, 37 aa, Homo sapiens; identical to SEQ ID NO: 30394

SEQ ID NO: 59741 - protein, 426 aa, Homo sapiens; identical to SEQ ID NO: 32682

SEQ ID NO: 59742 - protein, 50 aa, Homo sapiens
QPLETRPTRGVPPPPLRCGSAHWAPNVCVITKLHMGIVGFSRGFLPVSAC

SEQ ID NO: 59743 - protein, 61 aa, Homo sapiens
WLRGYDISFVSPLCPSPACCLSPSMPEPLWHCCGDRLWKNLALLEKSWFLEWKEKLCKRHS

SEQ ID NO: 59744 - protein, 305 aa, Homo sapiens
MSTAVVVKVVLCTVAPGRGSAPSLSSCLDWKVNGAEGSHNKDLFVLTYGALVAQLCKDYEKDEDVNQYLDKMGYGIGTRLVEDFLARSCVGRCHSYSEIIDIIAQDMERGFCALHIDTEGRYEWWTTSTQLQSTLPRAAQCSVYQKQPDRKSLTVGQKIEVGNPGIGTEQSPQGLVRFATQAFLTTHRAEGLQQSQVKGSVIHLKSQDKCGEHRFTTNQVETGDPVRESSSQHSVGRGGPKDIQIQGANVPVRQCNLLWRITLGPLETPHLEFSGECSLLAAMEAPEHTWDQEKSDIPEPPHRSS

SEQ ID NO: 59745 - protein, 122 aa, Homo sapiens
  misc_feature (1)...(122): Xaa = X or * as defined in Table 2
RQQDELALIAETLKCVDHXLSLDVLPRGCAXHRELCIHDLLKGNPLRRNILAGXTQERMQLQVESQSIPEEILGLQPQLGPMGGLWNVRFLLIPTVLWGFHCSQERAFPRKLQVKSFPVAQG

SEQ ID NO: 59746 - protein, 77 aa, Homo sapiens
YLAPPSLNLIINAGISSALAAPWDQKVVTPLDPVFTILCVSIISRPADLPGGRQERMRAKPKEKPLMKPSHLVRTAP

SEQ ID NO: 59747 - protein, 218 aa, Homo sapiens
MKVENNCQVARLLPEGQLYAKQIQGEPMNGRAVREVSHHQDSYPRKADVHSSRNGMRPLWRAYKRMHGDPEDACNNETEKFAEKAPQQETTNTSNHQKEEKTTLTPLQQTIQTAILNNLSPAIQTVKNYTYWAYIPFPPLIRAVTWMDAPIEVYVNDSIWMPGSLDDRCPAQPSEEGTPFNITLGFREPMNGRAVREVSHHQDSYPRKADVHSSGNGM

SEQ ID NO: 59748 - protein, 373 aa, Homo sapiens
  DOMAIN (271)..(312): TRANSFERASE METHYLTRANSFERASE BI domain identified by eMATRIX, accession number PD01427B, p-value=5.154e-32, raw score of 22.45
  DOMAIN (79)..(350): O-methyltransferase domain identified by PFam, accession name Methyltransf_2, E-value=4.7e-94, PFam score of 325.9
MGSSEDQAYRLLNDYANGFMVSQVLFAACELGVFDLLAEAPGPLDVAAVAAGVRASAHGTELLLDICVSLKLLKVETRGGKAFYRNTELSSDYLTTVSPTSQCSMLKYMGRTSYRCWGHLADAVREGRNQYLETFGVPAEELFTAIYRSEGERLQFMQALQEVWSVNGRSVLTAFDLSVFPLMCDLGGTRIKLETIILSKLSQGQKTKHRVFSLIGGAGALAKECMSLYPGCKITVFDIPEVVWTAKQHFSFQEEEQIDFQEGDFFKDPLPEADLYILARVLHDWADGKCSHLLERIYHTCKPGGGILVIESLLDEDRRGPLLTQLYSLNMLVQTEGQERTPTHYHMLLSSAGFRDFQFKKTGAIYDAILARK

SEQ ID NO: 59749 - protein, 263 aa, Homo sapiens
  misc_feature (1)...(263): Xaa = X or * as defined in Table 2
WCASHWGSGHAARHAXASHPLHGLLCSPSLPEEHHPLLHGAQSHRPPKGXGMXAHGTGLAGSSTCSPAQGLXIHQSAPCVXLKVCECTNRHSVSSCSDEDVCICSLCLGQXGPECIXCRIFLGPFNRLIEGAPHLCRSAMLNPLQEGAREQASARSGWLLRLLTQEQLLCRACIQTRRDREGKTRHRKGTPEIGKGRAFWKKSLKIILILFNCLRYWNAYMEIWVPALTGIPPNVTVNYATSSSKDSRTDGRVDLLMAVTDGM

SEQ ID NO: 59750 - protein, 96 aa, Homo sapiens
  misc_feature (1)...(96): Xaa = X or * as defined in Table 2
ISQARRAAPWGPVQPEPSRXAPPPASGHPVPSTTQRLRSAGARRGTGGQLHLQPRCGDPLGETSWAPESRRSAASLLKPARPRAHWEEQTTPDALL

SEQ ID NO: 59751 - protein, 159 aa, Homo sapiens
  misc_feature (1)...(159): Xaa = X or * as defined in Table 2
SCLPVLRRALAFLSPWVVDGTGRRGAAGGGRWGGSGRTGAHGVGGRLRHGGLQVPSPALQEGSXGSVRNRAQPGGLALLGDPVHPLQPLARVLSPSLPGDQQGWPAAPSVGPTKPTPTRNSSWPPSAAHSPGSCSCLSLHTSLESCRCPSINTSLHKHA

SEQ ID NO: 59752 - protein, 112 aa, Homo sapiens
RYKDSPRPHQTQEPSWLHLVDPAPRLQVELPASPALCARIPQPLGGHGTGRRGQGAALVGEARAGLPSLPSFFFSFLLSFLSFFLPSFPLFFSLFFPFCPVNCGEQCPIGKM

SEQ ID NO: 59753 - protein, 188 aa, Homo sapiens
  misc_feature (1)...(188): Xaa = X or * as defined in Table 2
VMRIQVLLYYLRFADQGTGFHLVLCLRHTAGVQXSWDSXSGLTPELVHLDGSHVLAASPRGSPGSPKXMGADQRSSESSPGPQPGGPRAEGPHHIQEAPRSAXAQGAGAEAARLGAGQASGCQSTRRPAGSRREPGVSLDGGHRAVVGIQFQAPSRRAAWGHPLHDAPGRRLMSRQLLTPRRRRHRGD

SEQ ID NO: 59754 - protein, 121 aa, Homo sapiens
  misc_feature (1)...(121): Xaa = X or * as defined in Table 2
HPGQWLRKVYWVPQQCRPTGAVLDFSPGCSCLPAGQGSGPAARHAXASHPLHGLLCGPSLPDEHHPLLHGAQSQRPPKGXGMRAHSAGLAGSSTCSPGAGSTRXSQLGSXVWXGRGESLCL

SEQ ID NO: 59755 - protein, 905 aa, Homo sapiens
  DOMAIN (766)..(797): Protein kinases ATP-binding region proteins domain identified by eMATRIX, accession number BL00107A, p-value=2.038e-12, raw score of 18.39
  DOMAIN (125)..(799): Eukaryotic protein kinase domain identified by PFam, accession name pkinase, E-value=6.7e-64, PFam score of 225.7
DIADLAFEVSGRKPHPFPSVSKIIADMLFNLLLQALFLIQGMFVSLFPIHLVGQLVSLLHMSLLYSLYCFEYRWFNKVVGSVHGRIGNCVSGRGNKFEELRDVPTLSGVALAHRGAQGVEVPEDKALLHKILVENPSARITIPDIKKDRWYNKPLKKDNLKISDFGLATVFRYNNRERLLNKMCGTLPYVAPELLKRREFHAEPVDVWSCGIVLTAMLAGELPWDQPSDSCQEYSDWKEKKTYLNPWKKIDSAPLGTSSQPNELSGSIDHQTSVQQLPGEFFSLENPSDAEALYETSSGLNTLSEHGSSEHGSSKHTVAEHTSGEHAESEHASGEPAATEHAEGEHTVGEQPSGEQPSGEHLSGEQPLSELESGEQPSDEQPSGEHGSGEQPSGEQASGEQPSGEHASGEQASGAPISSTSTGTILNCYTCAYMNDQGKCLRGEGTCITQNSQQCMLKKIFEEMSFSYFYMQTFIHHHSENINDTYHELQKDDSNINCVQRDYVIIRLSAAAAGFSAPAPRVPHSEVYKALCFTDCDPHSPVRWPHAGGGAAFQAQSGQERSPQPRLISPRLQSSPGRERQHLHVTLLEPPTFRGAGHGNARCLALRRGCASLRQRDALKFWREKRCIWIPAVVGKGQSAEVLGGVMAVPFVEDWDLVQTLGEGAYGEVQLAVNRVTEEAVAVKIVDMKRAVDCPENIKKEICINKMLNHENVVKFYGHRREGNIQYLFLEYCSGGELFDRIEPDIGMPEPDAQRFFHQLMAGVVYLHGIGITHRDIKPENLLLDERADRRVLPPIHVKMTKFGFLRLSYEKQDTLLKLLILSMAAVLYPLNEQILMLDNQGMQEHLLCRQELLGTIRDLTLPFAEEETDSQSGECSPDLFLLTYTSSLTLPLLLVAKGHNSDTY

SEQ ID NO: 59756 - protein, 214 aa, Homo sapiens
  misc_feature (1)...(214): Xaa = X or * as defined in Table 2
KMPASPLPSAMNGSLLRPPQKQKLLHFLYSLQKGISPNAIPPHSPHPTTAPVYSSQCERRRRQVISAFPTGDXSLHSNXEXQGGVEGEAPAGTWAVRGAXGPAGVPGGRGLGGLRTRSSWPALLAPGRQGSGPAARHGLSLPQPPWAPVQPEPPXGAPPPAPRRPVPSATQGLRSASARRRTGRQLHLQPPCGIHLVKPAGLLSLVGTWRVFMS

SEQ ID NO: 59757 - protein, 156 aa, Homo sapiens
  misc_feature (1)...(156): Xaa = X or * as defined in Table 2
MGQPLLLVRDSGGLQLWQKVKGEPVQQHERRIIPPAREEKVKRSPAGPPPSGGLDSSRHKIPSHEQASGVQPACRTNHQPRGIWCSPSLPDEKCPLLHSAQSHRSPKGXGVRAHGVGLAGSSTCSPSAGSNGXSQLGSXVXNKGRXIYPRTGRCGE

SEQ ID NO: 59758 - protein, 95 aa, Homo sapiens
QLPPPSVFPTTPKTELVLGTPGHGQPHRGGHESSDSAGGHLPLRALRSGWDPSPPSSVCATPTSSGLSSTPQLPLHQRTSSSTASWSPGWGMGSC

SEQ ID NO: 59759 - protein, 569 aa, Homo sapiens
  DOMAIN (277)..(322): kw TRANSCRIPTASE REVERSE II ORF2 domain identified by eMATRIX, accession number DM01354N, p-value=1.000e-40, raw score of 13.17
  DOMAIN (223)..(458): Reverse transcriptase domain identified by PFam, accession name rvt, E-value=6.5e-06, PFam score of 14.3
  misc_feature (1)...(569): Xaa = X or * as defined in Table 2
GSASGVVRSSRWARGLAGFRSEAADLHSECYSSXKQCGPKDXAEARFIAKSEGTKLPQCGRGPHXIQRFSTSPPDSGAQLASPSGSRTRAAGGAACQSWCRAPSTPQPLGGRWDWAPWSRGWRSSGTSGRTGAHGAGGRPQAWRAAGPQPCPAGRQLRPETLKQNIILSLIQCIGASLVPTGTAELEPSPSLQLRGTTDAAQAIKNEFARVQKRNLCRRGPICFEGDALSWFFEKINKIDRRLARRIKKKREKNQIEAIKNDKGDITTDPTEIQTTIREYYKHLYANKLENLEEMDKFLDPYTLPRISQEEVESLNRPITGSEIEAIINSLPTKKSPAPDGFTAEFYQRYKEKLIVLEVLARAIRQEKEIKGIQLGKEELKLSLFADDMIVYLENPIVSAQNLLKLISNFSKVSGYKINVQKSQAFLYSNNRQTESQIMSELPFTIASKRIKYLGIQLTRDVKDLFKENYKPLLNEVKEDTNKWKNIPCSWIGRINIVKMAILPKIEKQTWNNSQTLQCQPFCESDVCTSTLQIQERFEVAPLHKKALSSEEITIDKTDPSPAIEELTV

SEQ ID NO: 59760 - protein, 187 aa, Homo sapiens
FILTLLIKTYPRLSNLQKKQIYWTYRSTWLERPHSHGGRCWCPEEKWKKQGQKAQTQEPSWLHPVDPTLGLQVELPASPVPCGRTPQPLGGRWDRAPRSRGRRWWGGLGRAGAHGVGEAQAWQAAGPEPCPAGRKLRPGEKSSAAPVGRHCWGTWRTLRSCWPGAPPPRMANTIKWRRIRFLLLLSV

SEQ ID NO: 59761 - protein, 120 aa, Homo sapiens
  misc_feature (1)...(120): Xaa = X or * as defined in Table 2
APWSRGWCSSGRLGLHRSPWSGWEAQAWRAAGPEPRPAGRQLGAMSCKVETGTXDSEQRHRFGESWGHPWAGAQPTGPVLSGILNVLSSFSVLALPRPTGWPRPCSAASPSRCPAQSHQH

SEQ ID NO: 59762 - protein, 118 aa, Homo sapiens
  misc_feature (1)...(118): Xaa = X or * as defined in Table 2
GLSCLPAGQGSGPAARHVXASHPLHGLPCGPSLPNEHHPLLHGAQSHRPPKGXGMQAHDAGLAGSSTCSPGAGSTRXSQLGSXVCCTGRLVGTQQLRPESGXVSQPSPRLWAAAEGSC

SEQ ID NO: 59763 - protein, 95 aa, Homo sapiens
  misc_feature (1)...(95): Xaa = X or * as defined in Table 2
AYSSQLGESRRYSLDQCLAKXICEGRTCIFEEPCNCSSLYVRSNGGNHSHSTTTFKYNGSNWIPRWQGPSGSTQPSKARRPVAFSQGNCAMEKGN

SEQ ID NO: 59764 - protein, 817 aa, Homo sapiens
  DOMAIN (60)..(99): BIR repeat proteins domain identified by eMATRIX, accession number BL01282B, p-value=1.136e-10, raw score of 30.49
  DOMAIN (64)..(673): Zinc finger, C3HC4 type (RING finger) domain identified by PFam, accession name zf-C3HC4, E-value=4.2e-05, PFam score of 20.8
MKELQPGCHGRGYDLTAAQALEWSPSNVDGVSYLLQEIYGIENKYNTQDSKVAEDEVSDNSAECVVCLSDVRDTLILPCRHLCLCNTCADTLRYQANNCPICRLRKPQSGRGTAFRALLQIRAMRKKLGPLSPTSFNPIISSQTSDSEEHPSSENIPPGYEVVSLLEALNGPLTPSPAVPPLHVLGDGHLSGMLPSYGSDGHLPPVRTISPLDRLSDSSSQGLKLKKSLSKSTSQNSSVLHEEEDEHSCSESETQLSQRPSVQHLGEECGVTPESENLTLSSSGAIDQSSCTGTPLSSTISSPEGPASSSLAQSVMSMASSQISTDTVSSMSGSYIAPGTEEEGEALSSPQPASRAPSEEGEGLPAESPDSNFAGLPAGEQDAEAALSSHYQPISHASKGDCKSGMEQQGVCEREWGPATVQSDTPAAAVGLAAPGRQAVEGLSVCSLRPPCSSRCDGSGCSGQPTTVINISLRRPTSPRTREDSEKPGQYPKGHTEARQMPGQKDKVAKRSRKVLRGEGEWERANKKTMKTSSAKAAGPGWTHTLPEGSGPGGTGGQLEFWVGVGLAGSAPMAGLIALPARGNEGLSTRASGCGGCTGSPSSASPPALRSISRRALAAFPRGRARDLQPAMPEPPTPSVGSCAAPASPMSAAPCSTAPSPIDHPRAEECGHTARDWQAAPPAAPVRDPLGEASWAPESGGDVENLYVQLRDCKYTNQHPVFSSRFVSAPIDTLYLAALMRTSVSALCAWDSEGLVHLMQDFSWPLQQTHRRGTPPIRSAMLNPLQEGAREQASARSGWLLRLLTQEQLLCRACIQT

SEQ ID NO: 59765 - protein, 373 aa, Homo sapiens; identical to SEQ ID NO: 59748
  DOMAIN (271)..(312): TRANSFERASE METHYLTRANSFERASE BI domain identified by eMATRIX, accession number PD01427B, p-value=5.154e-32, raw score of 22.45
  DOMAIN (79)..(350): O-methyltransferase domain identified by PFam, accession name Methyltransf_2, E-value=4.7e-94, PFam score of 325.9

SEQ ID NO: 59766 - protein, 104 aa, Homo sapiens
  misc_feature (1)...(104): Xaa = X or * as defined in Table 2
IWISIGGFLFGCNFLFGAVLCFSLGLSCLPVEQGSGPAARHAXASHPLHGLLCGRSLPDEHRPLLHGAQSHRPPKGXGMRAHGAGLAGSSTCSPGAGSTRNREN

SEQ ID NO: 59767 - protein, 100 aa, Homo sapiens
  misc_feature (1)...(100): Xaa = X or * as defined in Table 2
PKGVGRALAAFPQDRAPGPAARHAXASHPLHELLCGQSLPDKRHPLLQGAQSHRPPKGXGVQAQGTGTGRQLHLQPWCGIHWVKPAGLLSSLGPRCFYKL

SEQ ID NO: 59768 - protein, 771 aa, Homo sapiens
MTLCVLEEQQRGQSGWCGVGKKMTYRIWGRRDNQPMARDLKPAMPESPTHSMGSCVARASPTSTTPCSTAPSPIDHPRAEERERTAQDWQAAPPAAPVRDPLETPKNRGRGVLTAARETGPQQALQSQDALSRRGAEAAPTTCMSPGGKFDFDDGGCYVGGWEAGRAHGYGVCTGPGAQGEYSGCWAHGFESLGVFTGPGGHSYQGHWQQGKREGLGVERKSRWTYRGEWLGGLKGRSGVWESVSGLRYAGLWKDGFQDGYGTETYSDGGTYQGQWQAGKRHGYGVRQSVPYHQAALLRSPRRTSLDSGHSDPPTPPPPLPLPGDEGGSPASGSRGGFVLAGPGDADGASSRKRTPAAGGFFRRSLLLSGLRAGGRRSSLGSKRGSLRSEVSSEVGSTGPPGSEASGPPAAAPPALIEGSATEVYAGEWRADRRSGFGVSQRSNGLRYEGEWLGNRRHGYGRTTRPDGSREEGKYKRNRLVHGGRVRSLLPLALRRGKVKEKVDRAVEGARRAVSAARQRQEIAAARAADALLKAVAASSVAEKAVEAARMAKLIAQDLQPMLEAPGRRPRQDSEGSDTEPLDEDSPGVYENGLTPSEGSPELPSSPASSRQPWRPPACRSPLPPGGDQGPFSSPKAWPEEWGGAGAQAEELAGYEAEDEAGMQGPGPRDGSPLLGGCSDSSGSLREEEGEDEEPLPPLRAPAGTEPEPIAMLVLRGSSSRGPDAGCLTEELGEPAATERPAQPGAANPLVVGAVALLDLSLAFLFSQLLT

SEQ ID NO: 59769 - protein, 102 aa, Homo sapiens
WIPHRGCRWSCLPVLCRALTFLSPWVVDGTGCRGAGGGAHRGGSGRTGAHGVGGRPQAWQAAGPEPCPMGRQVRPGEKSSAVPVGQPGWGTQYTLRSHWLGC

SEQ ID NO: 59770 - protein, 865 aa, Homo sapiens
  DOMAIN (242)..(272): kw TRANSCRIPTASE REVERSE II ORF2 domain identified by eMATRIX, accession number DM01354R, p-value=3.211e-25, raw score of 8.50
  DOMAIN (30)..(171): Lipocalin / cytosolic fatty-acid binding pr domain identified by PFam, accession name lipocalin, E-value=8.7e-34, PFam score of 120.5
MKPLLLAISLSLIAALQAHHLLASDEEIQDVSGTWYLKAMTVDRELPEMNLESVTPMTLTILEGGNLEAKATMLISGQCQEVKVVLEKTDEPGKYTANRGKHVAYIIRSHVKDHYIFYCEGELHGKPIRGAKLVGRDPENNLEALEDFEKAAGARGLSTESILIPRQSGTWMKLETIILSKLSQGQKTKHRMFSLIGSIIVKVPSSLQAHLQLSGKEVDVNSEVHVQEMAEARKDDVVTVTDAEKALDKIQHLFMVKTLSKIGIQGTYLKPEIFFDVVSLSTWQEVLSDSQREHLQQFLPQFPEDSAEQQNELILALFSGENFRFGNPLHIAQKLFRDGHFNPEVVKYRQLCFKSQYKRYLNSQQQYFHRLLKQILASRSDLLEMARRSGPALPFRQKRPSPSRTPEEREWRTQQRYLKVLREVKEECATLDLQEQFSFEDLSSWLPSSPARSPSPAVPLRVVPTLSTTDMKTAGENQAAAVTILGHCGGDLKTPLEGDKVELGDSDLKIMLKKHHEKRKHQPEQLARLASINDVRHGGFDFAGPAECSVCLNCYSDTVEYRNRLHLSSAQEDHPDLLTGDLTLNDIMTRVNAGRKGSLAALYDLAVLKKKVKEKEEKKKKKIKTIKSEAEDLAEPLSSTEGVAPLSQAPSPLAIPAIKEEPLEDLKPCLGINEISSSFFSLLLEILLLESQASLPMLEERVLDWQSSPASSLNSWFSAAPNWAELVLPALQYLAGESRAVPSSFSPFVEFKEKTQQWKLLAQASPTSAAPGSTAPSPIDHPRAEECERTARDWQAAPPAAPVRDPLGEASWAPESGGDVESLYVYLRDCKHTNQHPMSSSGFVSAPNRHSVSSCSGGALENLYV

SEQ ID NO: 59771 - protein, 676 aa, Homo sapiens; identical to SEQ ID NO: 41729

SEQ ID NO: 59772 - protein, 146 aa, Homo sapiens
  misc_feature (1)...(146): Xaa = X or * as defined in Table 2
QEAQPEESANDAQGDGPPGGKPQPQPEERSSCAQGVGPPGGQQESQDEERSSDAPEDGPPGGQQKPQPEERSSDAPEHDPPGGQQQPQPEERSSDAPEHDPPGGQQQPQSEERSNDAPGDGPPGGQQQPXPEERSSGAPGHSSPDV

SEQ ID NO: 59773 - protein, 405 aa, Homo sapiens
  DOMAIN (103)..(120): PWWP domain proteins domain identified by eMATRIX, accession number PF00855, p-value=3.588e-09, raw score of 13.75
IPDQNQPSMESEMGAAACPGSCSREFEVSFSASNPVLDYSHLIGSERNFQRLDFEELEEEGQASDKSLLPSRINLSLLDDDEEDEELPRFILHYETHPFETGMIVWFKYQKYPFWPAVIKSIRRKERKASVLFVEANMNSEKKGIRVNSRRLKKFDCKEKQMLVDKAREDYSESIDWCISLICDYRVRIGCGSFTGSLLEYYAADISYPVRKETKQDTFRNKFPKLHNEDAREPMAVTSQTKKMSFQKILPDRMKAARDRANKNLVDFIVNAKGTENHLLAIVNGTKGSRWLKSFLNANRFTPCIETYFEDEDQLDEVVKYLQEVCNQIDQIMPTWIKDDKIKFILEVLLPEAIICSISAVDGLDYEAAEAKYLKGPCLGYRERELFDAKIIYEKRRKAPTNEAH

SEQ ID NO: 59774 - protein, 92 aa, Homo sapiens
  misc_feature (1)...(92): Xaa = X or * as defined in Table 2
MLGRKPNHTSASRNTRLRHCSRARAQVKRMRQQRREEREAKRQPGTASGTSGIAERDSGKCSRKRGVQKVPGXXNTRQSKLRPREQCTTADP

SEQ ID NO: 59775 - protein, 327 aa, Homo sapiens
  misc_feature (1)...(327): Xaa = X or * as defined in Table 2
AAPPRSPSYRMIRKTRXMLGREAEPHVCQQEHQVEALQHGQGPGETDATAAERRRGRQRRQPGTASGTSGIAERDSGKCSRKRGVQKVPGXXNTRQSKLRPREQCTTADPXTLSTFPEGRGTELEPGFDSGASVLMRGCRAALSASSSPQGPGPQEMXATRNSWGRRQXGRHCKLPVLITGLQGDVVEGVHVGCASQEPLIQNDQEDEVDAWQKAEPHVCQQEHQVEALQHGQGPGETDATAAERRAGGKDASLVQHLVPAVLLSVTQGSVPEKEEFKKSLVNEILGKVNYDQGNNVPQQTLEHCPPFPKGEARSWSLASTPGPRFL

SEQ ID NO: 59776 - protein, 265 aa, Homo sapiens
  misc_feature (1)...(265): Xaa = X or * as defined in Table 2
NGCDSSGEKSGRQRRQPGTASGTSGIAERDSGKWSRKKREFKKSLVNEILGKVNYDQGNNVPQQTPSHHPNLEHCPPFPKGEAGAGAWLRLRGLGSYEGLPGCALCFFFPSRVLGLRRCEQQEIAGQQQGRDTQHGQQRSAEGRGRPGXGPGRTGPPAAQLPQSLRTTRRSRPWGRRQXGRGRXPPQGLMRCXRRPHHTGWSPQNEKRQPGRSFQQHKSHXRERRRARPVGQQVKAKRSQQFDDECGEDVRQEHSSRRDRVAVKS

SEQ ID NO: 59777 - protein, 131 aa, Homo sapiens
ERSLPGGVHHGRLNITYPMLFKLTNKNSDRMTHCGVLEFVADEGICYLPHWMMQNLLLEEGGLVQVESVNLQVATYSKFQPQSPDFLDITNPKAVLENALRNFACLTTGDVIAINYNEKIYELRVMETKPD

SEQ ID NO: 59778 - protein, 114 aa, Homo sapiens; identical to SEQ ID NO: 49330

SEQ ID NO: 59779 - protein, 187 aa, Homo sapiens
MTYSYSFFRPELIVNHLNYVHSEANRRTKTKTLLSLLSFLDETSGLSTHLPCLSLSKECGVLHLDIHGKKEDMRITQQSSQLYLWDMGGFTIFKNLWMSLIPRGNKRSPKRVTETILRDFKQKQSSKIQEERRRESAGPNLSSFWFVDLKKEKKTLPIATTWMNLEDIMLNEINRTQKDKYYMISLT

SEQ ID NO: 59780 - protein, 65 aa, Homo sapiens
  misc_feature (1)...(65): Xaa = X or * as defined in Table 2
VFKRVYIPFRSKLSSFFKCFPXWTALWEMLYAEEANPFSTIRILFQLEQPALGTSQYKILCLSST

SEQ ID NO: 59781 - protein, 234 aa, Homo sapiens
WRGGSGSGGWESGRRGFFVALPERSGVCQVVSIMFSFNMFDHPIPRVFQNRFSTQYRCFSVSMLAGPNDRIMPPSALDQLSRLNITYPMLFKLTNKNSDRMTHCGVLEFVADEGICYLPHWMMQNLLLEEGGLVQVESVNLQVATYSKFQPQSPDFLDITNPKAVYLFQISGVLLDKGECAGECVCRLENALRNFACLTTGDVIAINYNEKIYELRVMETKPDKAVSIIECDMN

SEQ ID NO: 59782 - protein, 560 aa, Homo sapiens
MDVECGIIDIGDAEGTWLSSVNTFTFIFSVALPFLEFFYNFIYIDISIPIKFSHLLCSASLLFWPQSPDILDITNPKAVLDNALRNFACLTTGNVTAINCNEKIYELELRVMETKPNKAVSITECDTNVDSDAPLGYKEPERQVQHEELTEDSLNSCMSPARFLEASEIVFGDQEAILPGVLLILKQFRAGNWKYLEEDAEEKSAWIKEQEPSTLVIPTMMFSRASWYPTYIILNWRAEATKGGMMSSFILTRVDSGTFGYLKSLVPPPPDEKRPQHLKKLDSFDLKGIYTRLNTYTKAVFVRDPMERLVSAFRDKFEHPNSYYHPVFGKAIIKKYRPNACEEALINGSGVKFKEFIHYLLDSHRPVGMDIHWEKLLQLQLWLKGANIELRLSLQRVQAQSLGSFHMVLSLWVHRNQELRFGNLRLDFRGCMEMPRYPGRSLRQWQTPQGECLPGQCERKMWGWIPYTESPLGHCLAELPQNGRSTDSLHHAPGKATDTQHQPMKAAKRGAVPCKATMVELPKAIGAYLLHQHDMDLCASVCGLLIRTPVVGFRADRHLV

SEQ ID NO: 59783 - protein, 740 aa, Homo sapiens
  DOMAIN (96)..(145): kw TRANSCRIPTASE REVERSE II ORF2 domain identified by eMATRIX, accession number DM01354Z, p-value=1.155e-35, raw score of 9.06
MTSVIRDTIMTRYGPILPTHQPHPIQQGACSRDKRIWSWEQKQETGSQLGWECKLVQLLWKTVWRFLKELKVELPFDPATPLLSIYPKEKKSLYEKDTRTCMFIAAQFTIAKIWHQPKCPPTNKWIKKMWYTYIKKYYSTIKRNEIMYFAATWMELEAIILSEHPLVLIHPQIFRPDAPLAKPWSLPFISSPLQPSEKSRLKTTHWGGGGSEDSGRQGAFVAFPERSGVCEVVSIMFSFNMFNHLIPRVFQNRFSTHYRCFSVSTLAGPNDKSDVEKGGKIIMLPSALDQLSQLNITYPMLFKLTSKNLDRMTHCGVLEFVADEGICYLPHWMMQNLLLEEGSLPQSPDILDITNPKAVLDNALRNFACLTTGNVTAINCNEKIYELELRVMETKPNKAVSITECDTNVDSDAPLGYKEPERQVQHEELTEGEADHSGYAGELGFRAFSGSGNRLDGKKESPSPIKPGDIKRGIPNHEFKLDSLNSCMSPARFLEASEIVFGDQEAIGSTFMGTHPIPELTLTFNWWRRVSIHFPESSNKREECGVLHLDIHGKKEDMRITQQSSQLYLWDMGGFTIFKNLWMSLIPRGNKRSPKRVTETILRDFKQKQSSKIQEERRRESAGPNLSSFWFVGRIWKAAIGQVGGSFRSEYWAFSEERHREGRRKGMLFSQILHMFQICKSPGKLPYGGESSYSTFLRKNYSPRRSAVLEWMKLSVQLESNVSDSVHQQTRFVLGQKKQI

SEQ ID NO: 59784 - protein, 367 aa, Homo sapiens
SGRRGFFVALPERSGVCQVVSIMFSFNMFDHPIPRVFQNRFSTQYRCFSVSMLAWPNDRSDVEKGGKIIMPPSALDQLSRLNITYPMLFKLTNKNSDRMTHCGVLEFVADEGICYLPHWMMQNLLLEEGGLVQVESVNLQVATYFQELSSCYLPHWLMQNLLLEEGGLVQVESVQPFKWATYSNFQPQSPDFLDITNPKAVLENALRNFACLTTGDVIAINYNEKIYELRVMETKPAKPVSIHECDMNVDFDAPLGYKEPERQVQHEESTEGEADHSGYAGELGFRAFSGSGNRLDGKKKGVEPSPSPIKPGDIKRGIPNYEFKLGKITFIRNSRPLVKKVEEDEAGGRFVAFSGEGQSLRKKGRKP

SEQ ID NO: 59785 - protein, 185 aa, Homo sapiens
  DOMAIN (90)..(124): IMMUNOGLOBULIN V REGION domain identified by eMATRIX, accession number DM00031B, p-value=3.953e-13, raw score of 15.41
  DOMAIN (40)..(123): Immunoglobulin domain identified by PFam, accession name ig, E-value=7.9e-10, PFam score of 36.7
FEAVSTMAWTPLLLLLLSHCTGSLSQPVLTQPASLSASPGASARFTCTLRSDINVGAYFVTWYQQKPGGLPRYLLRYKSDSDKQQGSGVPSRFSGSKDASMNAGLLLISGLQSEDEADYYCAIWYSSTSHRHNPKTLIAAASSAGDGDWFSHRQTVQVTKMRQKTLVFLQSSEPYPFWCLHWESK

SEQ ID NO: 59786 - protein, 165 aa, Homo sapiens
YCLHHFFFQVSLLVFAWCSEMHGNRQLWERTGEMGRRTPGLSWTAKSPIGRRSLRSARVPRTVAHSQRAKGSHSLWVLRPQKRRCAGKSPPPSRLARSPRCPEPLVALARQPLCVRRAGPEERARAQRRPPRVPPLLSQPGRALLLLLLRSSFLRSPASGSEQQP

SEQ ID NO: 59787 - protein, 100 aa, Homo sapiens
PLWSFVSPQGSLSLRKPSSGARISGGVRAAGGRGKPKRGGFSRPSTPRRAGPHPSIGSSPSDSCPLTACKGVALPVGSPPSEAALRRKSPPLRAGSREGS

SEQ ID NO: 59788 - protein, 106 aa, Homo sapiens
  misc_feature (1)...(106): Xaa = X or * as defined in Table 2
LPMNRPPRWTGTILAPIIELLLELQQKENMALGSRTHHGSSPNSGSAFCQMACCSSLKPALXSGRCSQPXWLWMSPLSRIFSISNSTSASSSIGNAIRRRRSRPGP

SEQ ID NO: 59789 - protein, 67 aa, Homo sapiens
RSRSLFNNRFRFRTRLVSSRVVAGLSNSRLCSSSSRTSFARASMGRKLHQAATHSSGITNSRLAEST

SEQ ID NO: 59790 - protein, 262 aa, Homo sapiens
FIAITVLPHWRSPQWYYPYWRGPVTALVRKVPAVAGERSSLWSVVGLIWKPGLGLALQGVGFAVIGTFVSLYFASKGWAMAGFTLTAFGGAFVVMRVMFGWMPDRFGGVKVAIVSLLVETVGLLLLWQAPGAWVALAGAALTGAGCSLIFPALGVEVVKRVPSQVRGTALGGYAAFQDIALGVSGPLAGMLATTFGYSSVFLAGAISAVLGIIVTILSFRRGQETAHQPDQQRAAYDLQRSNRRVLPASPASACRCSDAHSR

SEQ ID NO: 59791 - protein, 275 aa, Homo sapiens
  DOMAIN (150)..(205): Sodium:solute symporter family proteins domain identified by eMATRIX, accession number BL00456C, p-value=1.000e-40, raw score of 24.55
  DOMAIN (29)..(275): Sodium:solute symporter family domain identified by PFam, accession name SSF, E-value=4.5e-67, PFam score of 236.2
MLVTFCVYIFGMILIGFIAWRSTKNFDDYILGGRSLGPFVTALSAGASDMSGWLLMGLPGAVFLSGISESWIAIGLTLGAWINWKLVAGRLRVHTEYNNNALTLPDYFTGRFEDKSRILRIISALVILLFFTIYCASGIVAGARLFESTFGMSYETALWAGAAATILYTFIGGFLAVSWTDTVQASLMIFALILTPVIVIISVGGFGDSLEVIKQKSIENVDMLKGLNFVAIISLMGWGLGYFGQPHILARFMAADSHHSIVHARRISMTWMIPG

SEQ ID NO: 59792 - protein, 235 aa, Homo sapiens
  DOMAIN (61)..(99): Sodium:dicarboxylate symporter family proteins domain identified by eMATRIX, accession number BL00713D, p-value=6.063e- 09, raw score of 20.98
  misc_feature (1)...(235): Xaa = X or * as defined in Table 2
NGCIVRGKTSGSTFICVAMSVAASTVRRXCWLPGRKAAAWRTCWAPMTXAVMCWSRLMYGARLSLLVGCLVVVLSLIMGVILGLIAGYFGGLVDNIIMRVVDIMLALPSLLLALVLVAIFGPSIGNAALALTFAGLPHYVRLTRAAVLNCLAPLIVQASLGFSNAILDMAALGFLGMGAQPPTPEWGTMLSDVLQFAQSAWWVVTFPGLAILLTVLAFNLMGDGLRDALDPKLKQ

SEQ ID NO: 59793 - protein, 811 aa, Homo sapiens
  DOMAIN (76)..(113): LIPOPROTEIN-28 domain identified by eMATRIX, accession number DM01922B, p-value=1.794e-32, raw score of 17.80
  DOMAIN (362)..(746): Sodium:solute symporter family domain identified by PFam, accession name SSF, E-value=1.5e-136, PFam score of 467.1
MKLTTHHLRTGAALLLAGILLAGCDQSSSDAKHIKVGVINGAEQDVAEVAKKVAKEKYGLDVELVGFSGSLLPNDATNHGELDANVFQHRTFLEQDNQAHGYKLVAVGNTFVFPMADYGTRGGAVPRVLDDPKVDVAIISTTYIQQTGLSPVHDSVFIEDKNSPYVNILVAREDNKNAENVQTKCQGRTNDHQIKKRQNQTAVNDKVCSLSGIKRQQNQTANQHTPADDWTCRHIKCLQVIIMRVVDIMLALQVCCWRWCWWQFSARRLINYRCISATKARRFRVVDRISYSVKQGEVVGIVGESGSVNQTSSPAFPPAPARRRGTHPETRRNRQCVPELSSNKPTVSTSRETIATFTPPKRSGIQPNMTRITTNAPPNAISPTTLHSDGRSPARPVTLRTVPLQAHASTGNTIVVIASHVQNDRGSPVSYIAWMPAGPLVILLFFTIYCASGIVAGARLFESTFGMSYETALWAGAAATILYTFIGGFLAVSWTDTVQASLMIFALILTPVIVIISVGGFGDSLEVIKQKSIENVDMLKGLNFVAIISLMGWGLGYFGQPHILARFMAADSHHSIVHARRISMTWMILCLAGAVAVGFFGIAYFNDHPALAGAVNQNAERVFIELAQILFNPWIAGILLSAILAAVMSTLSCQLLVCSSAITEDLYKAFLRKHASQKELVWVGRVMVLVVALVAIALAANPENRVLGLVSYAWAGFGAAFGPVVLFSVMWSRMTRNGALAGMIIGALTVIVWKQFGWLGLYEIIPGFIFGSIGIVVFSLLGKAPSAAMQKRFAEADAHYHSAPPSRLQES

SEQ ID NO: 59794 - protein, 461 aa, Homo sapiens
MIQLSPPGPTLDMWGLLQLKRCEQHLLRCQICCGKDEKWAAYVGIIFAQFPGTQRPESWQPLMQTPPPYARPPSAPSPPPWWRRRSDPCGREKVKVTCPSLSRCSLLRPLYFPRPLPVGSQKHHLEVREPQLTAVPSGFVAFHNSFDFRTSLTLAPTPEPKEPPHLRNLSSLEASEPGVTLQGECQGQAKESLGGKKECIMAFSLSQGHFPVMSPRSPGYQDAYEKAKGEDAVGSHLRSGECTFTRRGVCWRLDLGLCSFQNLPDLQGRDGEAGEEHELWSKGELGVSKRKALKSQLTTTVTSILFPKSWFLKTEGREQFLKEEGASGDCLSISTGSQLSLEAAEYSSLEHQGRAGNRSWLRWSPVGSSSKQRTVRDPRGHLTISGDISVVVTGRSTDIHWIEARNAAKCYAVHRTAPIPSTKNYVAQNVSSVKVEKLSSRPTLTEFNNKPGRDQVDLQVT

SEQ ID NO: 59795 - protein, 72 aa, Homo sapiens
GIFLDMGMQNVSFFDAESGSHVYTFRSVSAEEPLRPFLAPSVPPNGDQGVLSICPLMNSGTTDAPVRPGEAK

SEQ ID NO: 59796 - protein, 272 aa, Homo sapiens
  DOMAIN (116)..(138): Domain in SPla and the RYanodine Receptor domain identified by eMATRIX, accession number PF00622B, p-value=9.700e-13, raw score of 21.00
  DOMAIN (132)..(257): SPRY domain identified by PFam, accession name SPRY, E-value= 3.4e-16, PFam score of 67.3
PQCMKMSLECGCTVCLKCINSLQKEPHGEDLLCCCCSMVSQRNKIRPNRQLERLVSHIKELEPKLKKILQMNPRMRKFQGKESVYPAPFPRPDQEKSSVQLARSGLITQNRQDLAERFDVSVCILGSPRFTCGRHYWEVDVGTSTEWDLGVCRESVHCKGKIQLTTELGFWTVSLRDGSRLSASTVPLTFLLVDRKLQRVGIFLDMGMQNVSFFDAESGSHVYTFRSVSAEEPLRPFLAPSIPPNGDQGVLSICPLMNSGTTDAPVRPGEAK

SEQ ID NO: 59797 - protein, 273 aa, Homo sapiens
  DOMAIN (34)..(56): Domain in SPla and the RYanodine Receptor domain identified by eMATRIX, accession number PF00622B, p-value=6.192e-15, raw score of 21.00
DMTSDIDTANNRLIISEDLWSVHCGFLRTAQSMPRFKQVICVLGSPRFTSGHHYWEKNKIRPSWQLERLASHIKELEPKLKKILQMNPRMRKFQVDMTLDADTANNFLLISDDLRSVRSGCITQNRQDLAERFDVSICILGSPRFTCGRHYWEVDVGTSTEWDLGVCRESVHRKGRIHLTTERGFWTHENCLPNESVNGRAEEGALQEGTGYIVLFLCLSNIQKEPGTPPTGFFATSLPIFLAKAMSLPVEPQPDAPPAYDPLKSLDKVQSPL

SEQ ID NO: 59798 - protein, 326 aa, Homo sapiens
  DOMAIN (170)..(192): Domain in SPla and the RYanodine Receptor domain identified by eMATRIX, accession number PF00622B, p-value=4.300e-13, raw score of 21.00
  DOMAIN (186)..(311): SPRY domain identified by PFam, accession name SPRY, E-value= 1.4e-13, PFam score of 58.6
QSWHTIPLCMKRLSLVTTNRLSPHGNFLPLSTFPLAVDMAALFQEASSCPVCSDYLEKPMSLECGCAVCFKCINSLQKEPHGEDLLCCYSSMVSRKNKIRRNRQLERLASHIKELEPKLKKILQMNPRMRKFQVDMTLDANTANNFLLISDDLRSVRSGRIRQNRQDLAERFDVSICILGSPRFTCGRHYWEVDVGTSTEWDLGVCRESVHRKGRIHLTTERGFWTVSLRDGSRLSASTVPLTFLFVDRKLQRVGIFLDMGMQNVSFFDAEGGSHVYTFRSVSAEEPLHLFFAPPSPPNGDKSVLSICPVINPGTTDAPVHPGEAK

SEQ ID NO: 59799 - protein, 250 aa, Homo sapiens
  DOMAIN (94)..(116): Domain in SPla and the RYanodine Receptor domain identified by eMATRIX, accession number PF00622B, p-value=9.700e-13, raw score of 21.00
  DOMAIN (110)..(235): SPRY domain identified by PFam, accession name SPRY, E-value= 7.6e-20, PFam score of 79.4
RNLKLVQGSCPHEKVLILEEETELKKLKSGDIWAFEVEERHGVGFCPLAEQLVFLFTVDMTLDADTANNFLLISDDLRSVRSGLITQNRQDLAERFDVSVCILGSPRFTCGRHYWEVDVGTSTEWDLGVCRESVHCKGKIQLTTELGFWTVSLRDGSRLSASTVPMTLLLVDRKLQRVGIFLDMGMQNVSFYDAESGSHVYTFRSVSAEEPLRPFVAPSIPPNGDQGVLSICPVMNSGTTDAPVRPGEAK

SEQ ID NO: 59800 - protein, 76 aa, Homo sapiens
RQSWENFSFQRWIHIPYPRLPTQQLLIGMPTPPPSNHFQYRKTLSGDLFPGMGSTSQNFLKMQETLQSVKRSFAVI

SEQ ID NO: 59801 - protein, 282 aa, Homo sapiens
  DOMAIN (210)..(257): HMG1/2 proteins domain identified by eMATRIX, accession number BL00353C, p-value=1.278e-14, raw score of 14.83
VLDRVPDGPVFIAMCFLVRVMDAVSFAAAMTASSSILAKAFPNNVATVLNSLNGQFDRMSSLGLGGPRLRKEGQREAARVVPVALAKDRPGRDRKLAVRLPQNRLNPETETPQARHCGSHLFRGGCEDCPHPRWPSTCNSRSCQSLRQVRVSVSILWVLATGTKLPPKGRRHGVHGVSAKVLNGIRPTGNLGKAILRDLNDFNVLKARNMALLLPVFKVCLHKHNQEKKAVNLKKKYEKDIAPQQAKGKPEAVKEGVAKAEKGKKKEEEENEEDEEDEEEED

SEQ ID NO: 59802 - protein, 21 aa, Homo sapiens
ILNAPKPPPPRDSARAEFLQR

SEQ ID NO: 59803 - protein, 63 aa, Homo sapiens
YCFTRGSEDCPHPRWPSTWNSRSCQSLRQVRVSDSILWVLATGTKLPPKGGRHGAHGVKRKSS

SEQ ID NO: 59804 - protein, 103 aa, Homo sapiens
  misc_feature (1)...(103): Xaa = X or * as defined in Table 2
HLCSYGRVYAADPYHHALAPAPTYGVGAMNAFAPLTDAKTRSHADDVGLVLSSLQASIYRGGYNRFAPYXMTKPXKPSNVGRKEAFRGLSIAIHAVVHHFSNS

SEQ ID NO: 59805 - protein, 101 aa, Homo sapiens
AAAYRGAHLRGRGRTVYNTFRAAAPPPPIPAYGGVVYQDGFYGADIYGVMLHTATPSLPLPLPLPTVTVTDEFMTFSPLSPLTCSSPHLRRWCHECFCTFD

SEQ ID NO: 59806 - protein, 705 aa, Homo sapiens
  DOMAIN (608)..(657): kw TRANSCRIPTASE REVERSE II ORF2 domain identified by eMATRIX, accession number DM01354Z, p-value=3.613e-13, raw score of 9.06
MDIDHSHAEGYVFINSGPSITIDKQGPGMIPCMPYGDYCSAERVPMPHLRPWHWLTPFLTGGFKILLESGCGTSCQVVGMPMIPALRIEEVSQDSTIICRCKIPPCKDEPSALRFKSGGGKSLLQCSRSLQDELGSLSGWKAESFREESGNTEAEDSLIQCPVWVQDVGDTVGTNIESSGHPYREMYKEVEINSVPGFPYPAATAAAAYRGAHLRGRGRTVYNTFRAAAPPPPIPAYGGLWNLVDLPEYFALSDDDFNILLLVCIRVYTGQQETSLCHCPAQQQNKRDLQLKMFVDAQCPFQLGGPVPRLGEGGYAAYRYAQPTPATAAAYSDRLSLMYGDGSEIVRKGRNQFVFVAADEISCNTSAGCYPSYQLEASSGVQGGVTSAFHFSIPTSQPTHAASYIKTLDSGDAMADKIDTAPASMEFSFQEGESYGRVYAADPYHHALAPAPTYGVGAMDRQYSSLCVSVCTGGDPTMGIRCPQTVPKLAWPLMDEKAVQGAWLWRKLTIIAEGKQEVGMSSMSRAGISRARTREGTIEQHTSFRYHLTPGTVLIRSMVSLEYGIVGDGEKLVVVMVRRWFQFFMPLAQDPQQTHPDNCPDSALDSFQASYGHVYKASPRYLRSISGEGRCPSTVDWIKKTQSMHGMEYYAAVRTEQNHVLCNNMDATSGHYLKGINATTENQIPHVLIDKWDLNIEYLWKYRRQ

SEQ ID NO: 59807 - protein, 91 aa, Homo sapiens
  DOMAIN (14)..(46): G-protein coupled receptors family 3 proteins domain identified by eMATRIX, accession number BL00979C, p-value=6.500e- 31, raw score of 15.37
FFSRVVPPDSYQAQAMVDIVTALGWNYVLTLASEGNYGESGVEAFTQISREIGYPSLFGIQGCLHECFAILCQVVYQFLLLMQLSDAQTVY

SEQ ID NO: 59808 - protein, 135 aa, Homo sapiens
  DOMAIN (5)..(42): G-protein coupled receptors family 3 proteins domain identified by eMATRIX, accession number BL00979N, p-value=1.000e- 40, raw score of 14.57
MQMYIQTTTLTVSMSLSASVSLGMLYMPKVYIIIFHPEQNVQKRKRSFKAVVTAATMQSKLIQKGNDRPNGEVKSELCESLETNILGIVLHVSRGMMVLTYRDTITFKTIRSKWSQDERLFYRVQTCSQNLFYKA

SEQ ID NO: 59809 - protein, 194 aa, Homo sapiens
  DOMAIN (105)..(136): G-protein coupled receptors family 3 proteins domain identified by eMATRIX, accession number BL00979E, p-value=2.227e- 33, raw score of 18.92
MCFYKVGGVCIAQSQKIPREPRPGEFEKIIKRLLETPNARAVIMFANEDDIRRILEAAKKLNQSGHFLWIGSDSWGSKIAPVYQQEEIAEGAVTILPKRASIDGFDRYFRSRTLANNRRNVWFAEFWEENFGCKLGSHGKRNSHIKKCTEIAVMEKATHKYVSSHKQAILSVNQIAASIISSLEDLSVYFLVLD

SEQ ID NO: 59810 - protein, 1142 aa, Homo sapiens
  DOMAIN (1013)..(1036): METABOTROPIC GLUTAMATE GPCR SIGNATURE domain identified by eMATRIX, accession number PR00248F, p-value=5.800e-29, raw score of 14.25
  DOMAIN (275)..(728): Receptor family ligand binding region domain identified by PFam, accession name ANF_receptor, E-value=1.2e-180, PFam score of 613.6
  misc_feature (1)...(1142): Xaa = X or * as defined in Table 2
MAAGGGSGGAGRRPIAAAGGSICYSHGRDLAPARPAQPPQPRDQPQVRPLCSPHAAAAAAAAALTWSCGPPAGFLTAPSAGSRVRLAARQQKAAPRKASAEPRDKKPLAPKLPQNALLVGKGESPRFIPLSVFFSKTFQRTARILKRSASDRLPWVTSRTCPGGIRTCPAEMTRYLRFANLTGGISEVSGFRDESGINFGSWIAIPPVEKMVCEGKRSASCPCFFLLTAKFYWILTMMQRTHSQEYAHSIRVDGDIILGGLFPVHAKGERGVPCGELKKEKGIHRLEAMLYAIDQINKDPDLLSNITLGVRILDTCSRDTYALEQSLTFVQALIEKDASDVKCANGDPPIFTKPDKISGVIGAAASSVSIMVANILRLFKIPQISYASTAPELSDNTRYDFFSRVVPPDSYQAQAMVDIVTALGWNYVSTLASEGNYGESGVEAFTQISREIGGVCIAQSQKIPREPRPGEFEKIIKRLLETPNARAVIMFANEDDIRRILEAAKKLNQSGHFLWIGSDSWGSKIAPVYQQEEIAEGAVTILPKRASIDGFDRYFRSRTLANNRRNVWFAEFWEENFGCKLGSHGKRNSHIKKCTGLERIARDSSYEQEGKVQFVIDAVYSMAYALHNMHKDLCPGYIGLCPRMSTIDGKELLGYIRAVNFNGSPKRDPDVSTLANSFYSFIFQXLGSAGTPVTFNENGDAPGRYDIFQYQITNKSTEYKVIGHWTNQLHLKVEDMQWAHREHTHPASVCSLPCKPGERKKTVKGVPCCWHCERCEGYNYQVDELSCELCPLDQRPNMNRTGCQLIPIIKLEWHSPWAVVPVFVAILGIIATTFVIVTFVRYNDTPIVRASGRELSYVLLTGIFLCYSITFLMIAAPDTIICSFRRVFLGLGMCFSYAALLTKTNRIHRIFEQGKKSVTAPKFISPASQLVITFSLISVQLLGVFVWFVVDPPHIIIDYGEQRTLDPEKARGVLKCDISDLSLICSLGYSILLMVTCTVYANKTRGVPETFNEAKPIGFTMYTTCIIWLAFIPIFFGTAQSAEKMYIQTTTLTVSMSLSASVSLGMLYMPKVYIIIFHPEQNVQKRKRSFKAVVTAATMQSKLIQKGNDRPNGEVKSELCESLETNTSSTKTTYISYSNHSI

SEQ ID NO: 59811 - protein, 913 aa, Homo sapiens
  DOMAIN (785)..(808): METABOTROPIC GLUTAMATE GPCR SIGNATURE domain identified by eMATRIX, accession number PR00248F, p-value=5.800e-29, raw score of 14.25
  DOMAIN (70)..(499): Receptor family ligand binding region domain identified by PFam, accession name ANF_receptor, E-value=1.3e-186, PFam score of 633.3
PPVEKMVCEGKRSASCPCFFLLTAKFYWILTMMQRTHSQEYAHSIRVDGDIILGGLFPVHAKGERGVPCGELKKEKGIHRLEAMLYAIDQINKDPDLLSNITLGVRILDTCSRDTYALEQSLTFVQALIEKDASDVKCANGDPPIFTKPDKISGVIGAAASSVSIMVANILRLFKIPQISYASTAPELSDNTRYDFFSRVVPPDSYQAQAMVDIVTALGWNYVSTLASEGNYGESGVEAFTQISREIGGVCIAQSQKIPREPRPGEFEKIIKRLLETPNARAVIMFANEDDIRRILEAAKKLNQSGHFLWIGSDSWGSKIAPVYQQEEIAEGAVTILPKRASIDGFDRYFRSRTLANNRRNVWFAEFWEENFGCKLGSHGKRNSHIKKCTGLERIARDSSYEQEGKVQFVIDAVYSMAYALHNMHKDLCPGYIGLCPRMSTIDGKELLGYIRAVNFNGSAGTPVTFNENGDAPGRYDIFQYQITNKSTEYKVIGHWTNQLHLKVEDMQWAHREHTHPASVCSLPCKPGERKKTVKGVPCCWHCERCEGYNYQVDELSCELCPLDQRPNMNRTGCQLIPIIKLEWHSPWAVVPVFVAILGIIATTFVIVTFVRYNDTPIVRASGRELSYVLLTGIFLCYSITFLMIAAPDTIICSFRRVFLGLGMCFSYAALLTKTNRIHRIFEQGKKSVTAPKFISPASQLVITFSLISVQLLGVFVWFVVDPPHIIIDYGEQRTLDPEKARGVLKCDISDLSLICSLGYSILLMVTCTVYAIKTRGVPETFNEAKPIGFTMYTTCIIWLAFIPIFFGTAQSAEKMYIQTTTLTVSMSLSASVSLGMLYMPKVYIIIFHPEQNVQKRKRSFKAVVTAATMQSKLIQKGNDRPNGEVKSELCESLETNSKSSVEFPMVKSGSTS

SEQ ID NO: 59812 - protein, 538 aa, Homo sapiens
  DOMAIN (453)..(466): Protein phosphatase 2C proteins domain identified by eMATRIX, accession number BL01032H, p-value=4.150e-09, raw score of 11.25
  DOMAIN (264)..(480): Protein phosphatase 2C domain identified by PFam, accession name PP2C, E-value=5.3e-20, PFam score of 73.9
MPRVRLARPPQPPARTAAAGRRSNMLTRVTSAVANFMGGIMAGSSGSEHGGGSCGGSDLPLRFPYGRPEFLGLSQDEVECSADHIARPILILKETRRLPWATGYAEVINAGKSTHNEDQASCEVLTVKKKAGAVTSTPNRNSSKRRSSLPNGEGLQLKENSESEGVSCHYWSLFDGHAGSGAAVVASRLLQHHITEQLQDIVDILKNSAVLPPTCLGEEPENTPANSRTLTRAASLRGGVGAPGSPSTPPTRFFTEKKIPHECLVIGALESAFKEMDLQIERERSSYNISGGCTALIVICLLGKLYVANAGDSRAIIIRNGEIIPMSSEFTPETERQRLQYLAFMQPHLLGNEFTHLEFPRRVQRKELGKKMLYRDFNMTGWAYKTIEDEDLKFPLIYGEGKKARVMATIGVTRGLGDHDLKVHDSNIYIKPFLSSAPEVRIYDLSKYDHGSDDVLILATDGLWDVLSNEEVAEAITQFLPNCDPDDPHRYTLAAQDLVMRARGVLKDRGWRISNDRLGSGDDISVYVIPLIHGNKLS

SEQ ID NO: 59813 - protein, 151 aa, Homo sapiens
HETTGPHKLHLHSHRPATHAHTVLHTHAKSHIHPGTRSPNHTVTGCPHPHTQRGSSRTHTSTPSAHSHKRPLDHPESAPRSHSHRPRRPTATMAITHANSSPQPSTHKRTGAGFLTLSFLQFRSGPAWPSYSGLQGAAAANWAQRKNLPPG

SEQ ID NO: 59814 - protein, 192 aa, Homo sapiens
  DOMAIN (88)..(139): D-alanine--D-alanine ligase proteins domain identified by eMATRIX, accession number BL00843C, p-value=1.000e-40, raw score of 22.31
  DOMAIN (9)..(192): D-ala D-ala ligase domain identified by PFam, accession name Dala_Dala_ligas, E-value=2.9e-99, PFam score of 343.2
QNVHPFRPVDVFFPIVHGSMGKDGSCQGMLRVANLPFVGSDVLASAACMDKDVTKRLLRDAGLNIAPFITLTRANRHNISFAEVESKLGLPLFVKPANQGSSVGVSKVTSEEQYAIAVDLAFEFDHKVIVEQGIKGREIECAVLGNDNPQASTCGEIVLTSDFYAYHTKSIDEDGAKVVVPAAIAPEINDKI

SEQ ID NO: 59815 - protein, 723 aa, Homo sapiens
  DOMAIN (331)..(364): D-alanine--D-alanine ligase proteins domain identified by eMATRIX, accession number BL00843D, p-value=2.000e-31, raw score of 17.54
  DOMAIN (266)..(382): D-ala D-ala ligase domain identified by PFam, accession name Dala_Dala_ligas, E-value=2e-63, PFam score of 224.1
MEHDVCEVIADVPWGYRRRARLSVKYLPRAQQLQMGFRKAGSSDIVDVKRCPMLAPQLEALVPKVRACVGSLQGMRHLGHVELVQATSGTLMILRHTAPLSSADREKLERFSHSEGLDLYLAPDSEILETVSGEMPWYDSNGLRLTFSPRDFIQVNAGVNQKMVARALEWLDVQPEDRVLDLFCGMGNFTLPLATQAASVVGVEGVPALVEKGQQNARLNGLQNVTFYHENLEEDVTKQPWAKNGFDKVLLDPAREHGINVLNSMAISGNDNPQASTCGEIVLTSDVYAYDTKYIDEDGAKVVVPAAIAPEINDKIRAIAVQAYQTLGCAGMARVDVFLTPENEVVINEINTLPGFTNISMYPKLWQASGLGYTDLITRLIELALERHAADNALKTTIGKYRNASSTPGNIAYALFVLFCFWAGAQLLNLLVHAPGVYERLMQVQETGRPRVEIGLGVGTIFGLIPFLWWRYGCTGDIAATDFELLWELATHAGQIMDRDALLKNLRGVSYDGLDRSVDVAISRLRKKLLDNAAEPYRIKTFYLLLFVCFLVMSLLVGLVYKFTAERAGKQSLDDLMNSSLYLMRSELREIPPHDWGKTLKEMDLNLSFDLRVEPLSKYHLDDISMHRLRGGEIVALDDQYTLMQRIPRSHYVLAVGPVPYLYYLHQMRLLDIALIAYIAISLALPVYIWMRPHWQDMLKLEAAAQRFGEGPLNEVSLDEVPL

SEQ ID NO: 59816 - protein, 539 aa, Homo sapiens
  DOMAIN (468)..(498): SOYBEAN TRYPSIN INHIBITOR (KUNITZ-TYPE) SIGNATURE domain identified by eMATRIX, accession number PR00291A, p-value=7.718e- 09, raw score of 19.85
KGPKGWANLNTKDTNVWEGDYQMVGRQGRGKADLMKQRGENRYTILDNGSFTSCLPGSDTWSVVGSEIIHDREEQVAEIWNARFKVGPVPIFYSPYLQLPVGDKRRSGFLIPNAKYTTTNYFEFYLPYYWNIAPNMDATITPHYMHRRGNIMWENEFRYLSQAGAGLMELDYLPSDKVYEDEHPNDDSSRRWLFYWNHSGVMDQVWRFNVDYTKVSDPSYFNDFDNKYGSSTDGYATQKFSVGYAVQNFNATVSTKQFQVFSEQNTSSYFAEPQLDVNYYQNDVVHFVTTRDDMPEATRVHLEPTINLPLSNNWGSINTEAKLLATHYQQTNLDWYNSRNTTKLDESVNRVMPQFKVDGRMVFERDMEMLAPGYTQTLEPRAQYLYVPYRDQSDIYNYDSSLLQSDYSGLFRDRTYGGLDRIASANQVTTGVTSRIYDDAAVERFNISVGQIYYFTESRTGDDNITWENDDKTGSLVWAGDTYWRISERWGLRGGIQYDTRLDNVATSNSSIEYRRDEDRLVQLNYRYASPEYIQATLP

SEQ ID NO: 59817 - protein, 64 aa, Homo sapiens
  misc_feature (1)...(64): Xaa = X or * as defined in Table 2
LDGDGIESINSLGQYGHFHDIDSSYPXAWNENVLPFVCILFYFVEQWFVALLEDVLHVPCKLDS

SEQ ID NO: 59818 - protein, 413 aa, Homo sapiens
  DOMAIN (227)..(278): D-alanine--D-alanine ligase proteins domain identified by eMATRIX, accession number BL00843C, p-value=1.000e-40, raw score of 22.31
  DOMAIN (219)..(397): D-ala D-ala ligase domain identified by PFam, accession name Dala_Dala_ligas, E-value=1.2e-108, PFam score of 374.3
TLSEGRYPVPSSQRPPGRGSGIRLPHDVATTMHIMRRDGGIHIWRDVPVIWQVELKVVGGGVLGVRDQETRATFVTHRQLQIGAIKDRYRTHLKAGVPDLRNLFFAVMNNFATYHAPGVRTRQTGGPLYRDPGDPPSGNHLPRRWYLWCSDSPSLSAPLRSPWYRRNGHYRAHQRESGEVVDMAAYEAWQQENHPDIQQQMQRREEGDNHFRTISFSNFIAEVESKLGLPLFVKPANQGSSVGVSKVTSEEQYAIAVDLAFEFDHKVIVEQGIKGREIECAVLGNDNPQASTCGEIVLTSDFYAYDTKYIDEDGAKVVVPAAIAPEINDKIRAIAVQAYQTLGCAGMARVDVFLTPENEVLINEINTLPGFTNISMYPKLWQASGLGYTDLITRLIELALERHAADNALKTTM

SEQ ID NO: 59819 - protein, 737 aa, Homo sapiens
  DOMAIN (517)..(562): kw TRANSCRIPTASE REVERSE II ORF2 domain identified by eMATRIX, accession number DM01354N, p-value=1.000e-40, raw score of 13.17
  DOMAIN (42)..(341): AP endonuclease family 1 domain identified by PFam, accession name AP_endonucleas1, E-value=3.8e-07, PFam score of -7.7
MRAKWRKKRTLRLKRQRRKMRQKSKVKLKIPSAVNEESLQALKFRERNPYLDFFTVILAHQLLQTTQFQELIDLHFWTHQKQANSRGSASGWQNGMSKSQPRGQMSDAVNSQWPEEGICPDQFRCLSLVNRLCPGQHIRTLADTKNPQLTAGSPADLVHGSTLPSWGLAHAGTESGEGSWGWRERINLGAKPRNQDDQDILDKEGTKPSKDNQGQIKQMNLRETCSWTFHKKFLKTVAFQISHPHKNTCLAMAVSANRSMRQKFNKDTQELNSALHQVDLIDIYRTLHPKSTEYTFFSAPHHTYSKIDHILGSKALLSKCKRTEIITNYLSDHSAIKLELRIKNLTQNRSTTWKLNKLLLNDYWVHNEMKAEIKMFFETNENKDTIYQNLWDAFKAVCRGKFIALNAHKRKQERSKIDTLTSQLKELEKQEQTHSKASRRQEITKIRAELKEIETQKTRQKINESSSWFFEGINKIDRPLARLIKKKREKNQIDTIKNYKGDITTDPTEIQTTIREYYKHLYANKLENLEEMDKFLDTYTLPRLNQEEVECLNRPITGAEIVAIINTLPTKKSPGPDGFTAEFYQRCSRWIKDLNVRPKTIKTLEENLGITIQDIGTGKDIMSKTPKAMATKDKIDKWDLIKLKSFCTAKETTIRVNRQPTKWEKIFATYSSDKGLISRIYNELKQIYKKKSNNPIKKWAKDMNRHFSKEDIYAAKKHMKKRSSLAIREMQIKTTMR

SEQ ID NO: 59820 - protein, 35 aa, Homo sapiens
  misc_feature (1)...(35): Xaa = X or * as defined in Table 2
KTSAAHEKPKWRKERNARGXKRKRRKMLQRSQVNR

SEQ ID NO: 59821 - protein, 73 aa, Homo sapiens
TFIVSAGSASPLSLIYPSSRSVSTRELNTALSKNSGALMPCSTERRCATVRLSFSSVPRLIDGLALNNQKVMA

SEQ ID NO: 59822 - protein, 195 aa, Homo sapiens
MELSGAKGARRQLRQQWGVRRCSATITFAWQNGNKNNKKKCLTLTDSLAELAVRYTKMFLTETLYRQLSRFSLKKVFWKNPKGLPDTFTGQPEYDPHVHPLKGNLFYAMPACRIRYQRYGSAGKLKVNNASMNGVRLTRALPLVRQTPLTGRLRRHYFWYTYPLWQHVRSNAYLPRPDGRPVGFRRTIRKTGERL

SEQ ID NO: 59823 - protein, 117 aa, Homo sapiens
ESRRRHTASFRINTGPRISVSSNVRSEYSSAASHAAVSRVQGGKLKAKVEIRVATVFRNAPEPFLRMIVVHELAHLLCGRTPVGERVGDTCYEAALVVDHAARRAPGRVSQDSLDLV

SEQ ID NO: 59824 - protein, 316 aa, Homo sapiens
  misc_feature (1)...(316): Xaa = X or * as defined in Table 2
ICRTCEVACAVSHHENQDCAALSPDEFISPVCWLARLVRWRCFFAQKARXSPAKYGILGELTTGSKLVKANGLMEASTIAAILLGSVAGGVLAYWHVLVAWPHAHWPTVSRQQQQLMASTLPFTSPLAQIFPWRAITQRTMRMPFVIDARDALLQGVFAAVNPSAHLNDSRHRRINKNVIEPGISCQRPQHLDRIAHPFGIHIHQLNAFTGRQFHRQQLLYLRQTFVVDIDHHHPRRLYAAVNGVIDSANAHRTCTRQQCNIAARFDAHAMLINILRGVIIGMISTNNAAHRLCQRRRSKIRSRDTGNTQPKLMQI

SEQ ID NO: 59825 - protein, 181 aa, Homo sapiens
  DOMAIN (61)..(73): 4Fe-4S ferredoxins iron-sulfur binding region proteins. domain identified by eMATRIX, accession number BL00198, p-value= 6.571e-11, raw score of 10.43
  DOMAIN (23)..(112): 4Fe-4S binding domain identified by PFam, accession name fer4, E-value=0.0019, PFam score of 20.2
KWSRSEAGIDELCSRNRVIIDHCWTTAVACHQCEDAPCANVCPVDAISREHGHIFVEQTRCIGCKSCMLACPFGAMEVVSSRKKARAIKCDLCWHRETGPACVEACPTKALQCMDVEKVQRHRPRLNFLRLWYVVHAHTLMRMRPRFIQPWEEVVPRHHQHAACFQALIELLGRNGQILKP

SEQ ID NO: 59826 - protein, 140 aa, Homo sapiens
  misc_feature (1)...(140): Xaa = X or * as defined in Table 2
HSALCSCRMRRERLIRPTKTCKFNRLQRLCRPDKRSASGNFAVVIRLERVSLLAPFFYGVLLLKCLMPKRQCNEADHHQTHTCAGQKKMATHPLPGENKFIIGEDREYRWALMFPNENAPVCWVGHVRXKSPLHQHIDRA

SEQ ID NO: 59827 - protein, 162 aa, Homo sapiens
  DOMAIN (94)..(106): 4Fe-4S ferredoxins iron-sulfur binding region proteins. domain identified by eMATRIX, accession number BL00198, p-value= 6.571e-11, raw score of 10.43
  DOMAIN (10)..(145): 4Fe-4S binding domain identified by PFam, accession name fer4, E-value=0.0052, PFam score of 17.4
CQGVIMNRFIIADATKCIGCRTCQVACAVSHHENQDCAALSPDEFISRIRVIKDHCWTTAVACHQCEDAPCANVCPVDAISREHGHIFVEQTRCIGCKSCMLACPFGAMEVVSSRKKARAIKCDLCWHRETGPACVEACPTKALQCMDVEKVQRHRLRQQPV

SEQ ID NO: 59828 - protein, 145 aa, Homo sapiens
  DOMAIN (97)..(110): REPRESSOR LEXA SERINE PROTEASE (S24) FAMILY SIGNATURE domain identified by eMATRIX, accession number PR00726C, p-value=9.690e- 13, raw score of 9.05
  DOMAIN (11)..(129): Peptidase family S24 domain identified by PFam, accession name Peptidase_S24, E-value=3.2e-45, PFam score of 163.6
ARFIRLVNQAFGISREIGTFSAITPIFVKCGFPSPATNSVDQRIDLNQLLIQHPSATYFVKASGDFMIDGGISAGDLLIVDSAIPASHGNIVIAAVDGEFTVKKLQLRPTVQLIPMNSAYSPITISSEDTLDVFGVVIHVVKAMR

SEQ ID NO: 59829 - protein, 217 aa, Homo sapiens
RKSPELPITIHGYLNDNNEKNGPGASMEYFDMRKMSVNLWRNAAGETREICTFPPAKRDFYWRASIASIAANGEFSLFPGMERIVTLLEGGEMLLESADRFNHTLKPFQPFAFAADQVVKAKLTAGQMSMDFNIMTRLDVCKAKVRIAERTFTTFGSRGGVVFVINGAWQLGDKLFTTDQGACWFDGRHTLRLLQPQGKLLFSEINWLAGHSPDQVQ

SEQ ID NO: 59830 - protein, 55 aa, Homo sapiens
CSMECTWRMMPALELSLHFNIQSQEDSHSALSHTESFLGWAPASPCTIKWLCVVA

SEQ ID NO: 59831 - protein, 100 aa, Homo sapiens
QQISRRNPTRQNWEMYCQRHDTPAGGMLMGVSRYAASEFSFLLAVPMMMGATALDLYKSWGFLTSGDIPMFAVGRIRRLRRIRQMPILIQALVRCSVQQQ

SEQ ID NO: 59832 - protein, 246 aa, Homo sapiens
  misc_feature (1)...(246): Xaa = X or * as defined in Table 2
CDHRNIVIRSAENISANFSHTGSVXGWMFTVPXSPSGRVVFXFCHLXATCGNXLNXTHSLSQGQRAFCILGFLPWHSRRIRSHVGLENECKVLLSGRSSQQMGEPXGRXFSPXVGPLGGRALLQLPQPNSVYVLPVSGLLVPAGECPLNVXPLVCSSANVLLSTSSCFCLCLARVSGFYRHRMGASGGFLMXVXRKGSSFNFLHMAASSWDSYSGHHFFXAGADYFFASSVSSLPLVLLHSLHSFF

SEQ ID NO: 59833 - protein, 474 aa, Homo sapiens
MHQQALTLQQAIDRQNDAEFGWGSRRRAQVTEQPDSRGKPSHSIFFWLLPSAESYLHSIKPCTHSPSPAAILSVVEGLTEFLPVSSTGHMIIVGHLLGFEGDTAKTFEVVIQLGSILAVVVMFWRRLFGLIGIHFGRPLQHEGESKGRLTLIHILLGMIPAVVLGLLFHDTIKSLFNPINVMYALVVGGLLLIAAECLKPKEPRAPGLDDMTYRQAFMIGCFQCLALWPGFSRSGATISGGMLMGVSRYAASEFSFLLAVPMMMGATALDLYKSWGFLTSGDIPMFAVGFITAFVVALIAIKTFLQLIKRISFIPFAIYRFIVAAAVYGLQASEFKAFFKPAKRIGKGTLELRAVCTNESPDTVPKLTEGFSNIDYVMFLEGNSLVVGTLLVKFLKALFSELRRFQVENKANKKKEELRQRVLVLTLLIPSVWMSSLFWTSAPPYLMFTCSPSNMTSDISPGWSLLLPAGGVLT

SEQ ID NO: 59834 - protein, 256 aa, Homo sapiens
  DOMAIN (53)..(107): BINDING-PROTEIN-DEPENDENT TRANSPORT SYSTEMS INNER MEMBRANE domain identified by eMATRIX, accession number DM00914D, p-value= 3.022e-13, raw score of 25.09
  DOMAIN (83)..(158): Glutathione S-transferases domain identified by PFam, accession name GST, E-value=4.1e-06, PFam score of 23.5
MRRTALGLFIQAVGINPVAARLAGVRTGSIVFFVYVYCSLVAGLAGLMIASNIKSADANNAGLLLELDAILAVTLGGGQLGGGSGEHLQPTWQGYGQTRRVPLLQIDDFELSESSAIAEYLEDRFAPPTWERIYPLDLENRARARQIQAWLRSDLMPIREERPTDVVFAGAKKAPLTAEGKASAEKLFAMAEHLLVLGQPNLFGEWCIADTDLALMINRLVLHGDEVPERLVDYATFQWQRASVQRFIALSAKQSG

SEQ ID NO: 59835 - protein, 295 aa, Homo sapiens
  DOMAIN (142)..(156): pfkB family of carbohydrate kinases proteins domain identified by eMATRIX, accession number BL00583C, p-value=9.486e- 11, raw score of 7.19
  DOMAIN (120)..(154): pfkB family carbohydrate kinase domain identified by PFam, accession name pfkB, E-value=2.5e-07, PFam score of 26.3
MLETDLQRDGAESEWREDTEAGQKEEKDRNTENTNMHWDSFLSHNSSREAESFSRAAPTDIHQAAYALLARIMACRPLVSLNRQEAEIAAERFALSAEITTLGKQWQEKFAAPLIVRLDKEGAWYFSNDASGCIPAFPTQVVDTIGAGDSHAGGVLAGLASGLPLADAVLLGNAVASWVVGHRGAYFQYRERSPFSKRKSDQNKEKHTAKKQNCHENQIQQSLKPLLLTLNLTGLALLRESSAVVDLTEGTAQAVMPAHPPAATHILRDHRTVPVHGLGAGDPWLRPFTVVTRSA

SEQ ID NO: 59836 - protein, 417 aa, Homo sapiens
  misc_feature (1)...(417): Xaa = X or * as defined in Table 2
MVSVTALKAAFLELFIPPSGLVVSLASGVKLQTFAVSVTAHKGSVDPKSDQHGLVVSLASGVKLQTFARRAEFPASQQQREVPRHDGGNHADRFTHDHRQLMATGGRHFAIHFVDRFGVPANGARRAGNIITQTVTNRFAGVESFQQCQLFGIYAVCERQGAEIPGPYARLFLATFFIYTSSFKPPLPWLRSLPRNTTPAVVRTAKGQVTAKYVIVAGNAYLGDKVEPELAKRSMPCGTQVITTERLSEDLARSLIPKNYCVEDCNYLLDYYRLTADNRLLYGGGVVYGARDPDDVERLVVPKLLKTFPQLKGVKIDYRWTGNLQLTLSRMPQFGRQDTNIYYMQGYSGHGVTGGSSRVGLMAGSQISRVSVCINPXYHRFNLHWRYVADAISADGAFRTVSGGGGRRSGAGRVDWQ

SEQ ID NO: 59837 - protein, 117 aa, Homo sapiens
IFSRTDISLYQHTAEQKHPYCWYPYPADSADISVNKHRRNATQLHVSCSFFLLSDQRFHHEAVPRRVVLFTFNTCVDKYIADIRSRTNGLGFLYAFKQRNSHFVFNAQRHRHSACLR

SEQ ID NO: 59838 - protein, 36 aa, Homo sapiens
EISNIQQADFPGVLATHPAFSRLLPCLHFIPKSANQ

SEQ ID NO: 59839 - protein, 387 aa, Homo sapiens
  DOMAIN (150)..(378): Transposase domain identified by PFam, accession name Transposase_18, E-value=2.9e-128, PFam score of 439.5
MKNKLPPFIEIYRALIATPSISATEEALDQSNADLITLLADWFKDLGFNVEVQPVPGTRNKFNMLATRRHEGRYITCMQPLPIIAEQEQEPEMTVRYYISSADLTAEKFATAIRNHWHVENKLHWRLDVVMNEDDCKIRRGNAAELFSGIRHIAINILTNDKVFKAGLRQGWEDIEDFGETHLDFLKQYGDFENGIPVHDTIARVVSCISPAKFHECFINWMRDCHSSDDKDVIAIDGKTLRHSYDKSTRRRGAIHVNNAFSTMHSLVIGQIKTDEKSNEITAIPELLNMLDIKGKIITTDAMGCQKDIAEKIQKQGGDYLFAVKGTQGRLNKAFEEKFPLKELNNPEHDSYAISEKSHGREEIRLHIVCDVPDELIDFTFEWKGLM

SEQ ID NO: 59840 - protein, 528 aa, Homo sapiens
  DOMAIN (32)..(233): Transposase domain identified by PFam, accession name Transposase_18, E-value=1.7e-101, PFam score of 350.6
NTSYIIKENKMELKKLMEHISIIPDYRQAWKVEHKLSDILLLTICAVISGAEGWEDIEDFGETHPDFLKQYGDFENGIPVHDTIARVVSCICPAKFHESFINWMLDYHSSDDKDVIAIDGKIHRHSYDKSRRKGAIHVISAFSTMHSLVIGQIKTDKKSHEITAFPELLNLLDIKGKIIKTDAMGCQKDIAEKIQKQGEDEKNIVERNVSTSGVSIYFEAYLYNATNCSSTPWHLPPMHMTSSQRRPSTAVDEEDEDSPSECHTPEKVKKPKKVYCYVSPKTSAYRCFSAPTAARQRPVQQHRVSFAVAKYPVRFYLEPPPATLFPPAFRHPSAASFKGNPNFELLRHWRTVKRLSEIRQQQGLSQRGPAELSGLTHSAISPIEQDKVSPAISTLQKLLKVYGLSLSEFFSEPEKPDEPQVVINQDDLIEMGSQGVSMKLVHNGNPNRTLAMIFETYQPGTTTGERIKHQGEEIGTVLEGEIVLTINGQDYHLVAGQSYAINTGIPHSFSNTSAGICRIISAHTPTTF

SEQ ID NO: 59841 - protein, 143 aa, Homo sapiens
  DOMAIN (84)..(109): Heat shock hsp20 proteins family profile domain identified by eMATRIX, accession number BL01031C, p-value=1.450e-10, raw score of 17.68
  DOMAIN (37)..(143): Hsp20/alpha crystallin family domain identified by PFam, accession name HSP20, E-value=4.7e-31, PFam score of 116.2
FQELLIMRNFDLSPLYRSAIGFDRLFNHLENNQSQSNGGYPPYNVELVDENHYRIAIAVAGFAESELEITAQDNLLVVKGAHADEQKERTYLYQGIAERNFERKFQLAENIHVRGANLVNGLLYIDLERVIPEAKKPRRIEIN

SEQ ID NO: 59842 - protein, 651 aa, Homo sapiens
  DOMAIN (275)..(307): ABC transporters family proteins domain identified by eMATRIX, accession number BL00211B, p-value=2.500e-19, raw score of 13.37
  DOMAIN (344)..(645): Trehalase domain identified by PFam, accession name Trehalase, E-value=8.3e-174, PFam score of 590.8
MNDAHFVNNLTLASEVGVYAHIPRLPANSTDIAPPDIPAGFVAVFNSDESSWHLVEDHRGKTVYDVASGNALFISELGPLPENVTWLSPEGEFQKWNGTAWVKDTEAEKLFRIREAEETKNNLMQVASEHIAPLQDAADLEIATEEEISLLEAWKKYRVLLNRILNGGYRSYEIRNHVNSFPPYEQGEIVINGEKITRPDYGDMLKRGIGYTPENRKEAGIIPWLGVDENTVLTNRQKISANGVLQWSTIRRLTEEVMQRMTVKAASSETPIGTLSGGNQQKVVIGRWVYAASQILLLDEPTRGVDIEAKQQIYRIVRELAAEGKSVVFISSEVEELPLKIQNPNPDELMIEVDLCYELDPYELKLDEMIEAEPEPEMIEGLPASDALTPGDRYLELFEHVQSAKIFPDSKTFPDCAPKMDPLDILIRYRKVRRHRDFDLRKFVENHFWLPEVYSSEYVSDPQNSLKEHIDQLWPVLTREPQDHIPWSSLLALPQSYIVPGGRFSETYYWDSYFTMLGLAESGREDLLKCMADNFAWMIENYGHIPNGNRTYYLSRSQPPVFALMVELFEEDGVRGARRYLDHLKMEYAFWMDGAESLIPNQAYRHVVRMPDGSLLNRYWDDRDTPRDESWLEDVETAKHEGHNRKHRTLC

SEQ ID NO: 59843 - protein, 43 aa, Homo sapiens
VSGSGPGRRSPGRWRYGNRLRRYAGGCIGQWRDRKPVVNDATG

SEQ ID NO: 59844 - protein, 374 aa, Homo sapiens
  misc_feature (1)...(374): Xaa = X or * as defined in Table 2
MHEVTLEDPSSAQILITVITGHGEIITLKRSSRRQNDIRMYCRRRPEAFRDHHQLRFLPGTDQAIGILMMSKVGTARPPDKTNIREMSVHTVVLICATRVFQCFNNAGNRDFIHRIAATRQAALHGREHRRTPRGVTTIGKMVRKTKTAAGWEHESGFYLDGVVKLNRFKSNVAGKMSSGGAANGSYHSNGLGGHIETGMRFTDGNWNLTPYASLTGFTADNPEYHLSNGMKSKSVDTRSIYRELGATLSYNMRLGNGMEVEPWLKAAVRKEFVDDNRVKVNSDGNFVNYLSGRRGIYQAGKDLDRFKNLVLVHAARYAADLSYLPLMQELEKRYEGKLRIQTVVSRETAAGSLTGGYRHXLKVGNWKARLACR

SEQ ID NO: 59845 - protein, 663 aa, Homo sapiens; identical to SEQ ID NO: 39185
  DOMAIN (464)..(496): ABC transporters family proteins domain identified by eMATRIX, accession number BL00211B, p-value=2.500e-19, raw score of 13.37
  DOMAIN (347)..(539): ABC transporter domain identified by PFam, accession name ABC_tran, E-value=3.2e-17, PFam score of 70.7

SEQ ID NO: 59846 - protein, 52 aa, Homo sapiens
YKELNLADSSLSEEALIQAMVDIPKLMKRPKVVANGKARIGRPPEQVLEIVG

SEQ ID NO: 59847 - protein, 127 aa, Homo sapiens
PSLNVAPSSAGVIISALADEEVLVSSVTSTSSGLPLRSRPSFTFVPGSVVAIRERNSAKLFSGLPLRLVIISPALTPAFAEPEPGNTSLTNAPRCTSRLKALAISALISVPLMPVSAQILPTMSPLW

SEQ ID NO: 59848 - protein, 332 aa, Homo sapiens
  DOMAIN (32)..(45): HTRA/DEGQ PROTEASE FAMILY SIGNATURE domain identified by eMATRIX, accession number PR00834F, p-value=6.684e-12, raw score of 10.91
  DOMAIN (2)..(74): PDZ domain (Also known as DHR or GLGF) domain identified by PFam, accession name PDZ, E-value=0.00016, PFam score of 28.4
MSADIAKAFNLDVQRGAFVSEVLPGSGSAKAGVKAGDIITSLNGKPLNSFAELRSRIGDNEPGTKAEAALNNRDQELAARAEGYALAGRLDQAISLLSSASSQSRETLNLLKENGVEPEVVLYLETPADAATLRDLLKILGMNSARELMRQKEDLYKELNLADSSLSEEALIQAMVDNPKLMERPIVVANGKARIGRPPEQYTVVKPTHRGFGSRIPRFFEIPTEGDRILQPTHGHDKLRLRAFGISRRWLYEISQYNVDKYGIRLLAYRTRRICLRMRELNGLRISFAARDDVATSANRTTCRPYYNKIRCPQSRPASRHVSRHLWASERR

SEQ ID NO: 59849 - protein, 53 aa, Homo sapiens
  misc_feature (1)...(53): Xaa = X or * as defined in Table 2
ICRQYPSPDDRTASGAGGGDHQQYGAGLRQTFCLCQRLSARTCXRLSASVCAT

SEQ ID NO: 59850 - protein, 535 aa, Homo sapiens
  DOMAIN (447)..(461): UvrD/REP helicase domain identified by eMATRIX, accession number PF00580B, p-value=1.474e-16, raw score of 10.52
  DOMAIN (402)..(526): UvrD/REP helicase domain identified by PFam, accession name UvrD-helicase, E-value=2.2e-44, PFam score of 160.8
  misc_feature (1)...(535): Xaa = X or * as defined in Table 2
MAAIQRAIDSVSHYLVLKTAISIITGLVAWAMLAALDVRFAFVWGLLAFALNYIPNIGSVLAASPLSLRHTSNRTLRIILRRRVNRIVSTNHQYGIGISKVNECRSFPGGFPRAPPPPSRWGMEQTFGSNFSSEHGAQEPPKSRVLAIICFTPPEEPIRWLASANTEKALIDKVAATTVATVVRITFIMSPGRIHKALFVGYEKQNRTNSSIEQAMLDAGLSAEEASAGAHAAMINFAKWRSRIDVPQQTHDTLKQLAKKWPLVAITNGNAQPELFGLGDYFEFVLRAGPHGRSKPFSDMYFLAAEKLNVPIGEILHVGDDLTTDRNAGLLDQTGKWRSDANLGQPFTAASGNFPVGISDLADIISKSVYIPSFLAEGVALLRPTYFYAAVPMDVSYLLDSLNDKQREAVAAPRSNLXCGKTRVLVHRIAWLMSVENCSPYSIMAVTFTNKAAAEMRHRIGQLMGTSQGGMWVGTFHGLAHRLLRAHHMDANLPQDFQILDSEDQLRLLKRLIKAMNLDEKQWPPRQAMCTSQIL

SEQ ID NO: 59851 - protein, 856 aa, Homo sapiens
  DOMAIN (457)..(471): UvrD/REP helicase domain identified by eMATRIX, accession number PF00580D, p-value=6.063e-18, raw score of 13.15
  DOMAIN (426)..(576): UvrD/REP helicase domain identified by PFam, accession name UvrD-helicase, E-value=2.5e-61, PFam score of 217.2
MPVRKNMIMNEGNITTPTNGCRIRASCGVPMICINQLKDGNKKPSPLTAARMKQKAIILFLIRTVRTDTHVVEDTGRKGSRKANSRERFPDAFPEFHGFADFRVLRQAMIQIWLVSMVQHVHNVCTTDACRIVQTRIVVTAGFQLSNASLVAMRRWVYRVRRIQYRRTTQTAVFHSTHGNYREGQPVGTLIDDRYKANENVELVHYAQPLLNEADSLAKVMPSDIPLKQRRWLGLQMLEGDIYSRAYAGEASQHLDAALARLRNEMDDPALHIADARYQCIAAICDVVSNTLTAEPSRFTTAVDKIVLNRFLGLPIFLFVMYLMFLLAINIGGALQPLFDVGSVALFVHGIQWIGYTLHFPDWLTIFLAQGLGGGINTVLPLVPQIGMMYLFLFFLEDSGAGLPGNLCAADAASCEPPLVSPCALKNILVDEFQDTNNIQYAWIRLLAGDTGKVMIVGDDDQSIYGWRGAQVENIQRFLNDFPGAETIRLEQNYRSTSNILSAANALIENNNGRLGKKLWTDGADVAGAPRGVIEASMPHRIYGGMRFLDRHEIKDALSYLRLIANRNDDAALDAWGIRARGGGGRFSSASQEGLVTLVNDPVCQPNQQTTTDNVADRNRNQVISDEIHHGPGEKNFRCRPTACKISGFEIADTIPSEQTSCDLCSNRGKTWDGRHMTLVISWADYYDRVTRCISWLISTHAPQYMPTFELNKAIVQKAEHYHFDFALSMIKLRGFGGKTEFWDHNLESFTLMAGLAAVTSRIQIYATAATLTLPPAIVARMAATIDSISGGRFGVNLVTGWQKPEYEQMGIWPGDDYFSRRYDYLTEYVQVLRDLWGTGKSDFKGDFFTMNDCRA

SEQ ID NO: 59852 - protein, 55 aa, Homo sapiens
PTWKGQLGFCGGGRMMLRTRAFRSPCWKMPAYRISCWNPAAWRKWSPRWQKWRTN

SEQ ID NO: 59853 - protein, 354 aa, Homo sapiens
  DOMAIN (316)..(330): UvrD/REP helicase domain identified by eMATRIX, accession number PF00580C, p-value=7.828e-15, raw score of 10.00
  DOMAIN (213)..(354): UvrD/REP helicase domain identified by PFam, accession name UvrD-helicase, E-value=1e-44, PFam score of 162.0
LSRLSLCNRVSVPTPTPLASTLPYSKSGLRRLNERGSGCAVSSACIKVAASAKCRGNRQSKRHGEPCRRSNTVTSQKSDLNTTIEFVSPNDVVSIREKAKKQSRVKAALELAEQREKPTWLEVDAGKMEEFLKPRLVDIEQVSSTHAKVTLEPLERGFGHTLGNALRRILLSSMPGCAVTEVEIDGVLHEYSTKEGVQEDILEILLNLKGLADFKILDSEDPVRLIKRLIKAMNLDEKQWPPRQAMWYINSQKDEGLRPHHIQSYGNPVEQTWQKVYQAYHEACDRAGLVDFAELLLRAHELWLNKPHILQHYRERFTNILVDEFQDTNNIQYAWNRLLAGDTGKVMMIGDDDQ

SEQ ID NO: 59854 - protein, 129 aa, Homo sapiens
VMRFAIVVTGPAYGTQQASSAFQFAQALIADGHELSSVFFYREGVYNANQLTSPASDEFDLVRAWQQLNAQHGVALNICVAAALRRGVVDETEAGRLGLASSNLQQGFTLSGLGALAEASLTCDRVVQV

SEQ ID NO: 59855 - protein, 30 aa, Homo sapiens
  misc_feature (1)...(30): Xaa = X or * as defined in Table 2
LSGKMVMXSIKATCQRVPLKYFFTFECYML

SEQ ID NO: 59856 - protein, 389 aa, Homo sapiens
  DOMAIN (231)..(276): PROTEIN OXIDOREDUCTASE NAD INTERGENIC RE domain identified by eMATRIX, accession number PD01311A, p-value=5.219e-29, raw score of 30.23
  DOMAIN (171)..(385): Oxidoreductase family domain identified by PFam, accession name GFO_IDH_MocA, E-value=3.4e-32, PFam score of 120.4
MPWLSTGAAALITALAVVELNDDDDHHHRNNSPLPPTPPDDESDDTPVPPTPGGDEIIPDDPDDTPTPPKPVSFNNDVILDKTEKTLTIRDSVFTYTENADGTISLQDSNGRKATINLWQIDEANNTVALEGGNTSACRQALKIPKGSSDYTVTWKGGHFTFYRRWRCKVHKVVFEGSPPVTICRYVLNRKNSWHVAHIFRRHAKPEEQCSHLFPYPFHHDLDEVLNDPDVKLVVVCTHADSHFEYAKRALEAGKNVLVEKPFTPTLAQAKELFALAKSKGLTVTPYQNRRFDSCFLTAKKAIESGKLGEIVEVESHFDYYRPVAETKPGLPQDGAFYGLGALFTNQQGFFKSSLLSIFADSSSSVAGRSPHNLVKKRGGIVAISAFAG

SEQ ID NO: 59857 - protein, 48 aa, Homo sapiens
PLYLVAGRAAIADKPAAQNAAVFADGKVRLARHSGWRYALNLLFAVAF

SEQ ID NO: 59858 - protein, 67 aa, Homo sapiens
LSSSVRKLCTALESACFNLQAGVMWQNSLLQFTSDKGSTSRTTSPIRIALAGLPRRMPPFFPRTAVT

SEQ ID NO: 59859 - protein, 397 aa, Homo sapiens
  DOMAIN (9)..(50): Bacterial regulatory proteins gntR family proteins. domain identified by eMATRIX, accession number BL00043, p-value=7.987e-09, raw score of 22.96
  DOMAIN (159)..(234): Acetyltransferase (GNAT) family domain identified by PFam, accession name Acetyltransf, E-value=3e-06, PFam score of 34.2
MASLPEGRMTSISEVTDVYGVSRNHMVKIINQLSRAGYVTAVRGKNGGIRLGKPASAIRIGDVVRELEPLSLVNCSILLRRSLLKWNMGINGSLFFRLRMATKNMRDMPAILAVKYIRQMVTGGAFAEANKGAVDDHDFVLFKERLADRPGIKQLVACIDGDVVGHLTIDVQQRPRRSHVADFGICVDSRWKNRGVASALMREMIEMCDHWLRIKRTYLGTLTFRHALFRKRFRHHAYPTPRAGVYDPTANANSHYWQHPHLVLYGCGGLACVFVTFRCQFVFVGVIPLLPGEHACIRKICDRPSVEYPVPSVFGDRSWNQDPHIQRNRVTPHRPMNHNVFNSARTAESPSEIRPVSWCKEMQIVLVAFPHASATQLPPNCERQLFGGVSGSPSRQI

SEQ ID NO: 59860 - protein, 126 aa, Homo sapiens
  misc_feature (1)...(126): Xaa = X or * as defined in Table 2
GPSSSEPSWAVAPGKAGDPHHSAEWARNSTPSKDQAXRRPHTICVTAYQGKVLLVGQSPNAELSARAKQIAMGVDGANEVYNEIRQGQPIGLGEASNDTWITTKVRSQLLTSDLVKSSNVKVTTEN

SEQ ID NO: 59861 - protein, 1268 aa, Homo sapiens
  DOMAIN (683)..(908): Aminotransferase class IV domain identified by PFam, accession name aminotran_4, E-value=9.5e-07, PFam score of -47.7
PLGELTRLMKVGETLRFLLGPQDVEIRIPSHRSARIQEMHMLTSRVKNHGGSFGIAFAIFEAPCVCHFPALGTQGLNWTYSSMWLGKPHKHDGRQGPSRLIFALMLRGAGDAHTDRAGCAVTWQANHADVVSEVFTTKLRTQTKILRFDQQFFFQFHIAERLTVLIPFRWQFIIVFRGRTKRAEVLWYYVPLYHVIIADRICSQKEEEGGRKRRKRGGGGGGGGGGGGGRRGGEKKQARGEKQGCFPCDAAGWVTYLHQILYGENIVKFRFSQQTAFQNDFTYTLTGFGTDFTHDVTVVVTDERVQIMDYYDSSLETAIDHDNYLEFQQVLSDIGEALEARFVLEDKLILLTNAVLPLRLENDELIVGSEDGIDPVSLAALTRKVGRKVRYVIVLRGQIVTGLRHWYARRRGHDPRAMLYNAVQHQWLTEQQAGEIWRQYVPHQFLFAEILTTLGHINRSAINVCYCAMNAVLCRSASFGHRRRYQPGNVGSRPDNSTRITSFDAITITQSRLRNWSPKMKENNLNRVIGWSGLLLTSLLEYQRTRRQYSDQRRRAGAERLSHFVIYPRLDKALKAQKNNDEATAIREFEYIHQQVPDNIPLTLYLAEAYRHFGHDDRARLLLEDQLKRHPGDARLERSLAAIPVEVKSVTTVEELLAQQKRAMLRRPCVVASATERCDVCCIAGRKNAANRSAATGIYLKQWYGTSVFEGIRCYDSHKGPVVFRHREHMQRLHDSAKIYRFPVSQSIDELMEACRDVIRKNNLTSAYIRPLIFVGDVGRAAPWYLPCSSCCCRNRFTFTLAEIAIQSADSAAAFGIEPRVAMLSYSTGTSGAGSDVEKVREATRLAQEKRPDLMIDGPLQYDAAQKKASDSGFIQQQTKDNQTRDGEPDWRRQTEPVGVTKGKEAFIFDTDRLPSEMMYARPRTISESGRIPGKTNLSVKHWLIVGMNDSTVLGGVRATEGQGFKAADIIGIGINGVDAVSELSKAQATGFYGSLLPSPDVHGYKSSEMLYNWVAKDVEPPKFTEVTDVVLITRDNFKEELGEKRFRRGRVIYVDHATDRRVDFSPSCLGLTLTEDGILTQGNEQVYIPQKELGVLIVLLESAGHVVLKDMIIESVWKNIIVSDESLTRCIYSLRCIFEKIGYDRCIETIYRKGYRFSGQVFKTKINEDNTSDYSIAIFPFTTSLNTLDPLILNQELVQIISNKKIDGLYTYPMAATNFGNDHISQNSFLSRFKPDYFVTGRINQNNAVNTLYIELIDAKKTFSSSQ

SEQ ID NO: 59862 - protein, 257 aa, Homo sapiens
GEYMKALSPIAVLISALLLQGCVAAAVVGTAAVGTKAATDPRSVGTQVDDGTLEVRVNSALSKDEQIKKEARINVTAYQGKVLLVGQSPNAELSARAKQIAMGVDGANEVYNEIRQGQPIGLGEASNDTWITTKVRSQLLTSDLVKSSNVKVTTENGEVFLMGLVTEREAKAAADIASRTTGGPSSLFSLSLSSHVCSVSLVLPLLIFLSISCSSMPLLSFIHRNKLSGCGKWRGHEFPPERFTPFCTTARGPRVLA

SEQ ID NO: 59863 - protein, 223 aa, Homo sapiens; identical to SEQ ID NO: 48184
  DOMAIN (183)..(196): Hexapeptide-repeat containing-transferases proteins domain identified by eMATRIX, accession number BL00101B, p-value=9.250e- 10, raw score of 8.91
  DOMAIN (2)..(198): FMN-dependent dehydrogenase domain identified by PFam, accession name FMN_dh, E-value=2e-05, PFam score of -146.4

SEQ ID NO: 59864 - protein, 743 aa, Homo sapiens; identical to SEQ ID NO: 39680
  DOMAIN (439)..(461): SpoU rRNA Methylase family domain identified by eMATRIX, accession number PF00588B, p-value=3.077e-18, raw score of 17.18
  DOMAIN (318)..(459): SpoU rRNA Methylase family domain identified by PFam, accession name SpoU_methylase, E-value=1.3e-60, PFam score of 214.8

SEQ ID NO: 59865 - protein, 77 aa, Homo sapiens
SQAVEMRCDRLIQYPSLTSSLPDSSRRDRARYRCTMHHDYRPRQFCLASHERSAASNRPAKHRPITLADDTPHDVVR

SEQ ID NO: 59866 - protein, 332 aa, Homo sapiens
  DOMAIN (125)..(147): SpoU rRNA Methylase family domain identified by eMATRIX, accession number PF00588B, p-value=3.077e-18, raw score of 17.18
  DOMAIN (4)..(145): SpoU rRNA Methylase family domain identified by PFam, accession name SpoU_methylase, E-value=6.9e-59, PFam score of 209.1
GGSMLNIVLYEPEIPPNTGNIIRLCANTGFRLHIIEPMGFAWDDKRLRRAGLDYHEFTAVTRHHDYRAFLEPQNPQRLFALTTKGTPAHSAVSYQDGDYLMFGPETRGLPASILDALPAEPKIRIPMVPDSRSMNLSNAVSVVVYEAWRQLGYPGAHHGTCANLRAAPNFNIAEDFRARANHHTFTNFRVTVTTRFTRTAKRHRLQNRYVVFNHRRFTNDDGRITTLATAPGRFAEAHASRGSLLPGKVVEGLPVMALNVNNVDVNFFRVKPESLPAFISQWEYRNSLANWQSDKLLQMADLVYTGRFVAPPHASVSSSPSRLGERHATFST

SEQ ID NO: 59867 - protein, 120 aa, Homo sapiens
RMSRSSDYDQYRSRNALIRRHIEKMDASLHVGTKEFDISKVSEVDSVDDLLIDNAARYLLKDWKGVGELVNGVEVALEYTAERGIALLKQNPELYWQILAEAASIAQGKEQQKQDTIKKP

SEQ ID NO: 59868 - protein, 171 aa, Homo sapiens
  DOMAIN (9)..(50): Bacterial regulatory proteins gntR family proteins. domain identified by eMATRIX, accession number BL00043, p-value=7.987e-09, raw score of 22.96
MASLPEGRMTSISEVTDVYGVSRNHMVKIINQLSRAGYVTAVRGKNGGIRLEGRMTSISEVTDVYGVSRNHMVKIINQLSRAGYVTAVRGKNGGIRLGKPASAIRIGDVVRDVEPLSLVNCSSEFCHITPACRLKQALSKAVQSFLTELDNYTLADLVEENQPLYKLLLVE

SEQ ID NO: 59869 - protein, 82 aa, Homo sapiens
TLRFGANSVLKPEIKRGFEYSDCWVDDARLVLANAQMVVRKGGEVLTRTRATSARRENGGKKYSWQARGLESLSQPVERLSP

SEQ ID NO: 59870 - protein, 647 aa, Homo sapiens
  DOMAIN (359)..(371): PROTEIN TRANSMEMBRANE INTERGENIC REGION RECQ-PLD domain identified by eMATRIX, accession number PD01736B, p-value=9.250e- 09, raw score of 8.42
MDYAVDKKAIDTATRQTLLGNSLVVVAPKASVQKDFTIDSKTNWTSLLNGGRLAVGDPEHVPAGIYAKEALQKLGAWDTLSPKLAPAEDVRGALALVERNEAPLGIVYGSDAVASKGVKVVATFPEDSHKKVEYPVAVVEGHNNATVKAFYDYLKGPQAAEIFKRYGFTINLPFGIFFAWLLVRCTFPGKALLDSVLHLPLVLPPVVVGYLLLVSMGRRGFIGERLYDWFGITFAFSGAARFSCRRHVVSADGLINERLQQEIMWHGKKEISTYPADDLDRDGDPFTRWGGQLLQLFGVHAEEWGYFKIIHLEGSPLTRIDGMMILGMFGGCFAAALWANNVKLRMPRSRIRIMQAIIGGIIAGFGARLAMGCNLAAFFTGIPQFSLHAWFFAIATAIGSWFGARFTLLPIFRIPVKMQKVSAASPLTQKPDQARRRFRLGMLVFFGMLGWALLTAMNQPKLGLAMLFGVGFGLLIERAQICFTSAFRDMWITGRTHMAKAIIIGMAVSAIGIFSYVQLGVEPKIMWAGPNAVIGGLLFGFGIVLAGGCETGWMYRAVEGQVHYWWVGLGNVIGSTILAYYWDDFAPALATDWDKINLLKTFGPMGGLLVTYLLLFAALMLIIGWEKRFFRRAHRRLLRRSHEKYRS

SEQ ID NO: 59871 - protein, 1368 aa, Homo sapiens; identical to SEQ ID NO: 56530
  DOMAIN (145)..(171): FAD-dependent glycerol-3-phosphate dehydrogenase proteins domain identified by eMATRIX, accession number BL00977B, p-value= 7.429e-20, raw score of 19.73
  DOMAIN (704)..(883): Aldo/keto reductase family domain identified by PFam, accession name aldo_ket_red, E-value=1.2e-100, PFam score of 347.8

SEQ ID NO: 59872 - protein, 55 aa, Homo sapiens
  misc_feature (1)...(55): Xaa = X or * as defined in Table 2
CHESHRQTDGGAVFRVYPGGGPRRECWFGSSLDEATPGWLLQLYERDRHXPASTG

SEQ ID NO: 59873 - protein, 269 aa, Homo sapiens
  DOMAIN (45)..(88): Xylose isomerase proteins domain identified by eMATRIX, accession number BL00172C, p-value=7.923e-39, raw score of 21.53
  DOMAIN (28)..(269): Xylose isomerase domain identified by PFam, accession name Xylose_isom, E-value=7.6e-162, PFam score of 551.1
NAPGIKTSWRTLRKRLLLLSRKTRMPGFTNPRYGAGAATNPDPEVFSWAATQVVTAMEATHKLGGENYVLWGGREGYETLLNTDLRQEREQLGRFMQMVVEHKHKIGFQGTLLIEPKPQEPTKHQYDYDAATVYGFLKQFGLEKEIKLNIEANHATLAGHSFHHEIATAIALGLFGSVDANRGDAQLGWDTDQFPNSVEENALVMYEILKAGGFTTGGLNFDAKVRRQSTDKYDLFYGHIGAMDTMALALNIAARMIEDWQLDKRIVQR

SEQ ID NO: 59874 - protein, 709 aa, Homo sapiens
  DOMAIN (263)..(318): Initiation factor 2 proteins domain identified by eMATRIX, accession number BL01176C, p-value=6.797e-24, raw score of 26.39
  DOMAIN (388)..(613): Xylose isomerase domain identified by PFam, accession name Xylose_isom, E-value=2.3e-148, PFam score of 506.3
MARRAALARAIALEPDLIMFDEPFVGQDPITMGVLVKLISELNSALGVTCVVVSHDVPEVLSIADHAWILADKKIVAHGSAQALQANPDPRVRQFLDGIADGPVPFRYPAGDYHADLLPGTADLDTASKLTRTDRPRSVEHECPNVVLVKDKKTFCSSATATSNQEQLAPSSRAQPKIAGIPLTVRLYADDWTWNDVWYAFLLGGMSGTVVGLLCYYLMSVRMRPGREIMTAIKREPILRGVSTGGGYTSSRCVIPRRIDRAKRMNKRMHIRGVHIVFFVPGGEWGGESQFVHVSAKAGTGIDELLDAILLQAEVLELKAVRKGLFDGLHKMRVIWQIITENFTQGKQGGYALFTAAARNKFANFIAKRIANINGISGIINAADRIPATNPDPEVFSWAATQVVTAMEATHKLGGENYVLWGGREGYETLLNTDLRQEREQLGRFMQMVVEHKHKIGFQGTLLIEPKPQEPTKHQYDYDAATVYGFLKQFGLEKEIKLNIEANHATLAGHSFHHEIATAIALGLFGSVDANRGDAQLGWDTDQFPNSVEENALVMYEILKAGGFTTGGLNFDAKVRRQSTDKYDLSYGHIGAMDTTALAPKLAARMTEDGELRLTHRAPPKGRSSWVMTTADAWHKPKCSRPETQLKRTMQRDDVTREHVEQILAAQATREARLAVADDVIDNNGAPDAIASDVVYTHNGNVQIQTYFL

SEQ ID NO: 59875 - protein, 547 aa, Homo sapiens
  DOMAIN (14)..(66): FAD-dependent glycerol-3-phosphate dehydrogenase proteins domain identified by eMATRIX, accession number BL00977A, p-value= 1.000e-40, raw score of 20.76
  DOMAIN (270)..(451): Xylose isomerase domain identified by PFam, accession name Xylose_isom, E-value=1.6e-83, PFam score of 290.9
ALTKVNEGSMETKDLIVIGGGINGAGIAADAAGRGLSVLMLEAQDLACATSSASSKLIHGGLRYLEHYEFRLVSEALAEREVLLKMAPHIAFPMRFRLPHRPHLRPAWMIRIGLFMYDHLGKRTSLPGSTGLRFGANSVLKPEIKRGFEYSDCWVDDARLVLANAQMVALEKCNSIVAFVVCHTSDEPCNCLPQVYGSDENASLTAYWYSGGVQGVCALLPGHHRVPGLLYAGSAAAVSGLLRQFGIRLDVQVRLIPILAQFAGISVLLGVWAFSRPWHQPGKALALAKRKADVAFEFFHKLHVPFYCFHDVDVSHESASLKEYINNFAQMVNVLAGKQEESGVKVLCGTVNCFTNPRYGAGYKTLLNTDLRQEREHLGRFMQMVVEHKHKIGFQGTLLIEPNPQDPTKHQYDCDAATVYGFLKQFGLEKEIKLNIQAIHATLAGLSFHQGTKLEPLKKGWLNCGKGRSLRSFWLLRNVAKGVCVQRRLSWQFKHAWLIKFWAPIPAVIASGILSTYYFGITGTFWTVTGEFTRWGRPAPATVRRPC

SEQ ID NO: 59876 - protein, 65 aa, Homo sapiens
  misc_feature (1)...(65): Xaa = X or * as defined in Table 2
RIFPTMCSMPTPIKQPRRWXVRKSVRTQVLSAADVRAKLFTLKVQDPKIDRANPTMVNMRWMMSA

SEQ ID NO: 59877 - protein, 42 aa, Homo sapiens
  misc_feature (1)...(42): Xaa = X or * as defined in Table 2
MCASAPXWCELPAGVVRPPASTTADYFPLFTLVHGGCAHGRF

SEQ ID NO: 59878 - protein, 146 aa, Homo sapiens
MMGVPSVLAPTVEAIVAVPMLIITEVRTPARITGAASAPVYIHRDNKVPAPGASTIVAETWNSAIKPHCLTGFYKPTGGTILLRDQHLEGLPGQQIARMGVVRTFQHVRLFREMTVIENLLVAQHQQLKTGLFSGLLKKQSAVDSR

SEQ ID NO: 59879 - protein, 474 aa, Homo sapiens; identical to SEQ ID NO: 47959
  DOMAIN (78)..(122): Delta-aminolevulinic acid dehydratase proteins domain identified by eMATRIX, accession number BL00169F, p-value=6.657e- 38, raw score of 18.30
  DOMAIN (6)..(132): Delta-aminolevulinic acid dehydratase domain identified by PFam, accession name ALAD, E-value=1e-83, PFam score of 291.5

SEQ ID NO: 59880 - protein, 952 aa, Homo sapiens
  DOMAIN (379)..(401): BACTERIAL PERIPLASMIC SPERMIDINE/PUTRESCINE-BINDING PROTEIN SIGNATURE domain identified by eMATRIX, accession number PR00909B, p-value=6.727e-20, raw score of 12.01
  DOMAIN (649)..(717): PAS domain identified by PFam, accession name PAS, E-value= 0.00017, PFam score of 22.1
MSQETPASTTEAQIKNKRRISPFWLLPFIALMIASWLIWDSYQDRGNTVTIDFMSADGIVPGRTPVRYQGVEVGTVQDISLSDDLRKIEVKVSIKSDMKDALREETQFWLVTPKASLAGVSGLDASSTAQHIIDRGRLPAVDILTGHNGGWCKHTSARLFKTVSSNDESIRAGILCPSGKCRDGTRRQQRSFFNHCKASTIEEGCRRFHQYYAMMRTRCDVGRQVFGLGGVSKILRDDDFPPNGSVRITQSSHLSLPLRVTSRFALDSLLTHRTGKWMLQVVTRYIMTPEHLPTEQYEAQLAEKVVRLQSMMAPFSDLVPEVFRSPVSHYRMRAEFRIWHDGDDLYHIIFDQQTKSRIRVDSFPRCSVLMHQLMTAMIAETGIKVVYDVFDSNEVLEGKLMAGSTGFDLVVPSASFLERQLTAGVFQPLDKSKLPEWKNLDPELLKLVAKHDPDNKFAMPYMWATTGIGYNVDKVKAVLGENAPVDSWDLILKPENLEKLKSCGVSFLDAPEEVFATIPTALKRMVIGDRHSIRLYHPNPEKIGYPMQFTKQGALEKGESYFITGKGSMGMAMRAKTPIFDDDGKVIGVVSIGYLVSKIDSWRAEFLLPMAGVFVVLLGILMLLSWFLAAHIRRQMMGMEPKQIARVVRQQEALFSSVYEGLIAVDPHGYITAINRNARKMLGLSSPGRQWLGKPIVEVVRPADFFTEQIDEKRQDVVANFNGLSVIANREAIRSGDDLLGAIISFRSKDEISTLNAQLTQIKQYVESLRTLRHEHLNWMSTLNGLLQMKEYDRVLAMVQGESQAQQQLIDSLREAFADRQVAGLLFGKVQRARELGLKMIIVPGSQLSQLPPGLDSTEFAAIVGNLLDNAFEASLRTHEGDKIVELFLSDEGDDVVIEVADQGCGVPESLRDKIFEQGVSTRADEPGEHGIGLYLIASYVTRCGWCYHSRR

SEQ ID NO: 59881 - protein, 121 aa, Homo sapiens
  misc_feature (1)...(121): Xaa = X or * as defined in Table 2
QKAGAVQVLLSLWSSLSAAAAGTSLLKEPQWSQRIEALGDTGKITEQGLSNTAIFSIRHTMAFLHSGSLDRPSALHSGTILSGKITSDICCPHFXSPGRPCSKQHWAEMLVHHVCLPCRCT

SEQ ID NO: 59882 - protein, 73 aa, Homo sapiens
  misc_feature (1)...(73): Xaa = X or * as defined in Table 2
SRLLGEITSPAIIFSPTLHSPAAHHQYRKALHGRFPARSRDPPALAPGWRSARRERXSSPARAAARWCRKFAG

SEQ ID NO: 59883 - protein, 29 aa, Homo sapiens
  misc_feature (1)...(29): Xaa = X or * as defined in Table 2
ADGTGRRALGGXATGPAGRWESYSFTDSV

SEQ ID NO: 59884 - protein, 151 aa, Homo sapiens
  misc_feature (1)...(151): Xaa = X or * as defined in Table 2
PPGATLPTVARGTPQMGKEGSSPAKSLAPPLCEQMGQEDGHWGAGWGLAQVLLIALDGLLDAQQHGGEPLGPAGRWSRIPSPTRCSCPHSAPRGPLAIFSSTCIPGNQRKLGTAPHTFGQPAWRXACRCRSGRGPPXRSSLWRCTEEGAVH

SEQ ID NO: 59885 - protein, 807 aa, Homo sapiens
  DOMAIN (483)..(648): ABC transporter domain identified by PFam, accession name ABC_tran, E-value=0.006, PFam score of -30.6
RPPHKPYKNIVPTPFKNLYKITGRHANKVHRSRSSLGHDVHDADDTSIPADVEEKLLRFARAGLAVASMKGKSYLSLGGVSMGIAGSIVDHNFFESWLGMKVQAVDMTELRRRIDQKIYDESRIGNGHWAWADKNFRYGEDENNKQYQRNAEQSRAVLRESLLMAMCIRDMMQGNSKLADIGRVEESLGYNAIAAGFQGQRHWTDQYPNGDTAEAILNSSFDWNGVREPFVVATENDSLNGVAMLMGHQLTGTAQVFADVRTYWSPEAIERVTGHKLDGLAEHGNAAIPNFLADAPSRSTLKLEEAFHVFIPADEWDERLANGMWAVDLGACPGGWTYQLVKRNMWVYSVDNGPMAQSLMDTGQVTWLREDGFKFRPTRSNISWMVCDMVEKPAKVAALMAQWLVNGWCRETIFNLKLPMKKRYEEVSHNLAYIQAQLDEHGINAQIQARQLYHDREEVTVHVRRIWAASTRQKRQSTRRDDNTITQEETEKRRTEEKEEHGKARITWKVYRGSEIARMGVVRTFQHVRLFREMTVIENLLVAQHQQLKTGLFSGLLNTPSFRRAQSEALDRAATWLERIGLLEHANRQASNLAYGDQRRLEIARLHGDAAGDFNARRTCGRHKMEKVMLSFDKVSAHYGKIQALHEVSLPYPSGRDCMLIGYELEFVPGIAVPGGIVTGPFPVLERNLSVPEAKMGTRIGGKAFRNPWPDKRTRTTSQCQQAQVAAADLTAHCGAAAFAASAHRVPAPITGVPQLCNSPPLSTTRQPATKAGDSLDARSRNRPSCTRCSPGVTSANCTGAAERRRI

SEQ ID NO: 59886 - protein, 148 aa, Homo sapiens
  misc_feature (1)...(148): Xaa = X or * as defined in Table 2
PERSGLQEAGGGSRGWGKRSLPPAETAGLSGYMCFRAWLSLSRWDSEDGHWGAGWGLAQVLLIALGWSSXCASNGWLSHWFQPGRXSRIPFTDSVXLVHILLPVGPLAIFFINLAFPGIRESWEQLLILLEKPVGLEACPCKSGKGRP

SEQ ID NO: 59887 - protein, 251 aa, Homo sapiens
MLALDQREAMRMIFPAAGAPAPALSPYASARILVDQQFCYRQVVEQNAIAKSCAMIVAADEFIPGNGIPVDSVVIDRKINPLQIKQDGGKALKLLVLWRSDEDAQQRLDMVKEFNELCHSHGLVSIIEPVVRPPRRGDKFDREQAIIDAAKELGDSGADLYKVEMPLYGKGPQQELLCASQRLNDHINMPWVILSSGVDEKLFPRAVRVAMTAGASGFLAGRAVWASVVGLPDNELMLRDVCAPKSGEPIL

SEQ ID NO: 59888 - protein, 61 aa, Homo sapiens
  misc_feature (1)...(61): Xaa = X or * as defined in Table 2
KIHFGFFCHCAESGSLDGRHFAPGVXRSEQHESGSGAVSGTGYWCSRDYRSREIDGLYRNW

SEQ ID NO: 59889 - protein, 220 aa, Homo sapiens
IHTDHRPGEIAATTLANRAALSGAALRRRRRQNQTIAVGWRLAGTAHACNIISIRGYGSDEDAQQRLDMVKEFNELCHSHGLVSIIEPVVRPPRRGDKFDREQAIIDAAKELGDSGADLYKVEMPLYGKGPQQELLCASQRLNDHINMPWVILSSGVDEKLFPRAVRVAMTAGASGFLAGRAVWASVVGLPDNELMLRDVCAPKLQQLGDIVDEMMAKRR

SEQ ID NO: 59890 - protein, 237 aa, Homo sapiens
LNADVGKHGKSGEKRKNNGNQRHAPRFIAVNQTIGRAIVAADFFIIFQLWQNTVRQLFTQFHAPLVEGEDVQDHALSKDFVLIQRNQRTQAERSDFTQQDGVGRAVTFEYFERHHVVKRCRIFTLDTIFLLNHFAEFTKRQRFRLVFSDIQVDVFQGMEFAVVEVQITNPGPGQLLPFRKRAHRKLKDRHRQVGDRLHHVRAPELVGERGKQQRRGFTSNTGNRQQDTGHNPGHRRS

SEQ ID NO: 59891 - protein, 126 aa, Homo sapiens
RLTKVEMPFYGKGPQQELLCASQGLNDHINMPWVILSSGVDEKLFPRAVRVAMTAGASGFLAGRAVWASVVGLPDNELMLRDVCAPKLQQLGDIVDEMMAKRRFIPLLRRWVDLALTRWLITVSKP

SEQ ID NO: 59892 - protein, 797 aa, Homo sapiens
  DOMAIN (264)..(309): TRANSFERASE ACYLTRANSFERASE PHOSPH domain identified by eMATRIX, accession number PD02355C, p-value=1.551e-26, raw score of 21.47
  DOMAIN (29)..(351): Phosphate acetyl/butaryl transferase domain identified by PFam, accession name PTA_PTB, E-value=9.9e-124, PFam score of 424.5
  misc_feature (1)...(797): Xaa = X or * as defined in Table 2
MESGVATRPIADFDVYIDKLTEFVYKTNLFMKPIFSQARKAPKRVVLPEGEEARVLHATQELVTLGLAKPILIGRPNVIEMRIQKLGLQIKAGVDFEIVNNESDPRFKEYWTEYFQIMKRRGVTQEQAQRALISNPTVIGAIMVQRGEADAMICGTVGDYHEHFSVVKNVFGYRDGVHTAGAMNALLLPSGNTFIADTYVNDEPDAEELAEITLMAAETVRRFGIEPRVALLSHSNFGSSDCPSSSKMRQALELVRERAPELMIDGEMHGDAALVEAIRNDRMPDSSLKGSANILVMPNMEAARISYNLLRVSSSEGVTVGPVLMGVAKPVHVLTPIASVRRIVNMVALAVLFVNADETTVVNFHACFACVEVFTVRHTTNRYQHGVVTLRFSGCFFAFHRHINAVFFRFNIQAVFVALRPEVIAIMHKLREQGHRVVVLSNTNRLHTTFWPEEYPEIRDAADHIYLSQDLGMRKPEARIYQHVLQAEGFSPSDTVFFDDNADNIEGANQLGITSILVKDKTTIPDYFAKDKARHRTRPLWAWLKLLWQRIDEDNMTTLAGNLAYVSLLSLVPLVAVVFALFAAFPMFSDVSIQLRHFIFANFLPATGDVIQRYIEQFVANSNKMTAVGAGQSGDQFLFALFNCQCFDADELKRIKNELEPKMGMELNLVQLIAYTDWNETQQKQPDGSWVNYNYDWMFKPGAMKQVAEYADGIGPDYHMLIEETSQPGNIKLTGMVQDAQQNKLVVHPYTVRSDKLPEYTPDVNQXFAVRWVIIMNILAWXKMSLVIAMAFTPQVP

SEQ ID NO: 59893 - protein, 88 aa, Homo sapiens
YPQGSRITPCANRDRDGHRHLNPWEPYKRGIMIGFDSSMDYAWIYRSILESVALTFAKHVIITGGGSNSDLFMPDFCRRVQPSGTRTP

SEQ ID NO: 59894 - protein, 124 aa, Homo sapiens
  misc_feature (1)...(124): Xaa = X or * as defined in Table 2
NRLLAGRISSGTGDHFSGAAGIDSSLRPVWXTXTLRDQMSGGQSAKQPGRFAQWFYPXRLPETGXVPEXCLXXCELIRANDHFLVSILPLRSPCVPLHLSTTPLRLAMDLTGLSGFPIPLSQSA

SEQ ID NO: 59895 - protein, 551 aa, Homo sapiens
  DOMAIN (80)..(119): 3-hydroxyisobutyrate dehydrogenase proteins domain identified by eMATRIX, accession number BL00895B, p-value=8.200e-29, raw score of 21.14
AEAVRHLVDKGATPAANRAQAAKDADVIITMLQNGDLVRNVLFGDSGVCEGLSTDALVIDMSTIHPLQTDKLIADMQAKGFSMMDVPVGRTSANAITGTLLLLAGGTAEQVERATPILMAMGSELINAGGPGMGIRVKLINNYMSIALNALSAEAAVLCEALNLPFDVAVKVMSGTAAGKGHFTTSWPNKVLSGDLSPAFMIDLAHKDLGIALDVANQLHVPMPLGAASREVYSQARAAGRGRQDWSAILEQVRVSAGMTAKYTINDITRASGGFAMLAVDQREAMRMMFAAAGAPAPVADSVLTDFKVNAAKALSPYASAILVDQQFCYRQVVEQNAIAKSCAMIVAADEFIPGNGIPVDSVVIDRKINPLQIKQDGGKPLKLLVLWRSDEDAQQRLDMVKEFNELCHSHGLVSIIEPVVRPPRRGDKFDREQAIIDAAKELGDSGADLYKVEMPLYGKGPQQELLCASQRLNDHINMPWVILSSGVDEKLFPRAVRVAMTAGASGFLAGRAVWASVVGLPDNELMLRDVCAPKLQQLGDIVDEMMAKRR

SEQ ID NO: 59896 - protein, 739 aa, Homo sapiens
  DOMAIN (24)..(227): Transposase domain identified by PFam, accession name Transposase_15, E-value=2.4e-122, PFam score of 419.8
MVEVIEPFYPKAGNGRRPYPLETMLRIHCMQHWYNLSDGAMEDALYEIASMRLFARLSLDSALPDRTTIMNFRHLLEQHQLARQLFKTINRWLAEAGVMMTQGTLVDATIIEAPSSTKNKEQQRDPEMHQTKKGNQWHFGMKAHIGVDAKSGLTHSLVTTAANEHDLNQLGNLLHGEEQFVSADAGYQGAPQREELAEVDVDWLIAERPGKVRTLKQHPRKNKTAINIEYMKASIRARVEHPFRIIKRQFGFVKARYKGLLKNDNQLAMLFTLANLFRADQMIHHSHLAITTAFANEPVPQKDKAVINMGDFSLIHVQPEFQTAFEHTPTLLPDGFHLCFGAFDDEDKIIGIAAVRHRGFPLPVFSDRRTSAPLDTVIPVPPIFSGFPAQVALMQDLGIALDVANQLHVPMPLGAASREVYSQARAAGRGRQDWSAILEQVRVSAGMTAKYTINDITRASGGFAMLAVDQREAMRMMFAAAGAPAPVADSVLTDFKVNAAKALSPYASAILVDQQFCYRQVVEQNAIAKSCAMIVAADEFIPGNGIPVDSVVIDRKINPLQIKQDGGKALKLLVLWRSDEDAQQRLDMVKEFNELCHSHGLVSIIEPVVRPPRRGDKFDREQAIIDAAKELGDSGADLYKVEMPLYGKGPQQELLCASQRLNDHINMPWVILSSGVDEKLFPRAVRVAMTAGASGFLAGRAVWASVVGLPDNELMLRDVCAPKLQQLGDIVDEMMAKRR

SEQ ID NO: 59897 - protein, 121 aa, Homo sapiens
PWWLGGLAEPAAGAAKDAQKAQELAVSTCARLTACCATGAWPPTSAPSSSALGGLLGLPGPAGSGHARSLELGAAFPLHAPRRRWCAQERGGGCDPRKPWPPSFSAPCCWRLWPCRVRGEA

SEQ ID NO: 59898 - protein, 39 aa, Homo sapiens
CWALLSILFSLYLATLVLAGGLNVDYAVLRGILCLFSFA

SEQ ID NO: 59899 - protein, 1041 aa, Homo sapiens
  DOMAIN (351)..(392): ATP-dependent serine proteases lon family, serine active sit. domain identified by eMATRIX, accession number BL01046D, p-value= 1.000e-40, raw score of 19.61
  DOMAIN (1)..(240): Uncharacterised protein family UPF0052 domain identified by PFam, accession name UPF0052, E-value=9.6e-86, PFam score of 298.3
MRNCLNQLITEPSVASAMFEYRFGGNGELSGHNLGNLMLKALDHLSVRPLEAINLIRNLLKVDTHLIPMSEHPVDLMAIDDQGHEVYGEVNIDQLTTPIQELLLTPNVPATREAVHAINEADLIIIGPGSFYTSLMPILLLKEIAQALRRTPAPMVYIGNLGRELSLPAANLKLESKLAIMEQYVGKKVIDAVIVGPKVDVSAVKERIVIQEVLEASDIPYRHDRQLLHNALEKALQALVFFAILLRCRDKQLTQLMQLVTNLRRVLRTPDSARVASSTLPAHGLFVLPTLYVFPRLNIPYALPPAIKRNRWSPRTYIVLCRVTDPENGESGRENPLFLLDEIDKMSSDMRGDPASALLEVLDPEQNVAFSDHYLEVDYDLSDVMFVATSNSMNIPAPLLDRMEVIRLSGYTEDEKLNIAKRHLLPKQIERNALKKGELTVDDSAIIGIIRYYTREAGRLSTLLLDKSLKHIEINGDNLHDYLGVQRFDYGRADNENRVGYKRVMDRCALELDVWRRVLAYVDLNYYHDPHSTEIEEDVSTISDDSVKLRGEIKVGVTGNISQRVSLRGSVAWQKGSDDFAQTAGFLSMTMAEEALGTSFKRLCAHYSRMRCWRILSGLRGARPNKIVCRIRRLRRIRPILRLRFPRHSRVVFIFGGGNPRRAKQRQTGEEVEKCHQPQHGTKCCARGGFHQRWQGVGHHDFNHFKTNSSQKCSANQGFFARTVARQPPEDPEEKQIVGEDGNRQANQSPRRFQPLNAVQVQGANNHLLRRTGNRGDRKRHNQRNQQTNQRNKSRRYFTQTWDLLVLSPRRMTEALLWQHETRHAYNAQGLANRCIPDSLPAVEWLTYGSGYLAGMKLGDTPLVEYTRDRLHRETLRSFGRYELTTAYTPAGQLQSQHLNSLLSDRDYTWNDNGELIRISSPRQTRSYSYSTTGRLTGVHTTAANLDIRIPYATDPAGNRLPDPELHPDSTLSMWPDNRIARDAHYLYRYDRHGRLTEKTDLIPEGVIRTDDERTHRYHYDSQHRLVHYTRTQYEEPSRSK

SEQ ID NO: 59900 - protein, 60 aa, Homo sapiens
RSTCPAGPCKPGRRRAPSSCPRSAPAPPRSCPCRSAGGVATPGRPWPPSFSAPCCWRLWP

SEQ ID NO: 59901 - protein, 403 aa, Homo sapiens
  DOMAIN (55)..(87): Bacterial-type phytoene dehydrogenase proteins domain identified by eMATRIX, accession number BL00982A, p-value=7.923e- 15, raw score of 18.41
  DOMAIN (55)..(208): Pyridine nucleotide-disulphide oxidored domain identified by PFam, accession name pyr_redox, E-value=9.8e-08, PFam score of 28.9
  misc_feature (1)...(403): Xaa = X or * as defined in Table 2
KCADLPVRGLRHCWRRREDPSGADRSFSALIHSGRAAFWPCRXQGALMSEDIFDAIIVGAGLAGSVAALVLAREGAQVLVIERGNSAGAKNVTGGRLYAHSLEHIIPGFADSAPVERLITHEKLAFMTEKSAMTMDYCNGDETSPSQRSYSVLRSKFDAWLMEQAEEAGAQLITGIRVDNLVQRDGKVVGVEADGDVIEAKTVILADGVNSILAEKLGMAKRVKPTDVAVGVKELIELPKSVIEDRFQLQGNQGAACLFAGSPTDGLMGGGFLYTNENTLSLGLVCGLHHLHDAKKSVPQMLEDFKQHPAVAPLIAGGKLVEYSAHVVPEAGINMLPELVQIPCIERNAINAVKAVNAARMAMRRTSAPRVSLDKVIETMYETGKDMNDKYRETSRGGLAIKV

SEQ ID NO: 59902 - protein, 86 aa, Homo sapiens
SVACAFCLLFVFCCYVRLPPAFLFSCPCFVSSRRIGCLLLCFLFWLLCCSLWFWIVCFRVVLYGADSRSGLLDTGTSLSKSRPSWN

SEQ ID NO: 59903 - protein, 218 aa, Homo sapiens
  DOMAIN (174)..(184): Domain of unknown function domain identified by eMATRIX, accession number PF00990A, p-value=9.769e-09, raw score of 9.89
  DOMAIN (13)..(161): PAC motif domain identified by PFam, accession name PAC, E- value=7.4e-10, PFam score of 40.2
  misc_feature (1)...(218): Xaa = X or * as defined in Table 2
XGIRQTRALANRVLNKEGEVERLLGINMDMTEVKQLNEALFQEKERLHITLDSIGEAVVCIDMAMKITFMNPVAEKMSGWTQEEALGVPLLTVLHITFGDNGPLMENIYSADTSRSAIEQDVVLHCRSGGSYDVHYSITPLSTLDGSNIGSVLVIQDVTESRKMLRQLSYSASHDAVTHLANRASFEKQLRILLQTVNSTHKRHALVLIDLDPRVPSW

SEQ ID NO: 59904 - protein, 216 aa, Homo sapiens
  DOMAIN (105)..(151): Respiratory-chain NADH dehydrogenase 51 Kd subunit proteins domain identified by eMATRIX, accession number BL00644C, p-value= 1.000e-40, raw score of 17.10
  DOMAIN (4)..(216): Respiratory-chain NADH dehydrogenase 51 domain identified by PFam, accession name Complex1_51K, E-value=2.1e-101, PFam score of 350.3
LGVCAMTNSQCGCDEYRSKNGYEGARKALTGLSPDEIVNQVKDAGLKGRGGAGFSTGLKWSLMPKDESMNIRYLLCNADEMEPGTYKDRLLMEQLPHLLVEGMLISAFALKAYRGYIFLRGEYIEAAVNLRRAIAEATEAGLLGKNIMGTGFDFELFVHTGAGRYICGEETALINSLEGRRANPRSKPPFPATSGAWGKPTCVNNVETLCNVPAIL

SEQ ID NO: 59905 - protein, 162 aa, Homo sapiens
  DOMAIN (20)..(66): PTR2 family proton/oligopeptide symporters proteins domain identified by eMATRIX, accession number BL01022B, p-value=6.143e- 32, raw score of 22.19
  DOMAIN (49)..(119): POT family domain identified by PFam, accession name PTR2, E- value=5e-29, PFam score of 100.1
MRALLILYLTNQLKYNDTHAYELFSAYCSLVYVTPILGGFLADKVLGNRMAVMLGALLMAIGHVVLGASEIHPSFLYLSLAIIVCGYGLFKSNVSCLLGELYEPTDPRRDGGFSLMYAAAARDIAYLMYLENALRAEGAGGNPNLSRMAMPPINLYQNQRGG

SEQ ID NO: 59906 - protein, 201 aa, Homo sapiens
  DOMAIN (89)..(102): DECARBOXYLASE PHOSPHATIDYLSERINE domain identified by eMATRIX, accession number PD02876C, p-value=3.667e-16, raw score of 8.80
MKEAQKPDTASYRTFNEFFVRPLRDEVRPIDTDPNVLVMPADGVISQLGKIEEDKILQAKGHNYSLEALLAGNYLMADLFRNGTFVTTYLSPRDYHRVHMPCNGILREMIYVPGDLFSVNHLTAQNVPNLFARNERVICLSDTEFGPMAQILVGATNGGSIETENVVEKRVRGAQCVSSGSGSASRQECSRHVQAMMVSNR

SEQ ID NO: 59907 - protein, 54 aa, Homo sapiens
  misc_feature (1)...(54): Xaa = X or * as defined in Table 2
TPAARDAQLSGGRGWYXCSAGNGLMQHRSQSGDWRAGRPFTEGWXPTPDWQIEA

SEQ ID NO: 59908 - protein, 48 aa, Homo sapiens
SPGTDRGMTDGSHWHPAPHDRSPSTTPPASPPCDCRELYPPKSHRGLA

SEQ ID NO: 59909 - protein, 673 aa, Homo sapiens
  DOMAIN (237)..(284): Chaperonins clpA/B proteins domain identified by eMATRIX, accession number BL00870A, p-value=1.000e-40, raw score of 11.78
  DOMAIN (506)..(671): Clp protease domain identified by PFam, accession name CLP_protease, E-value=2.7e-120, PFam score of 413.1
  misc_feature (1)...(673): Xaa = X or * as defined in Table 2
KTINRTSLWYWTLHDHWSVTGRCAFTDVTKVEDHHEPQTQTRGLVMTTSXATTXKLTVSLTTACVMNWVXMQVIPSPTAKIRLXLRTSNWLTSTTTLTTNNDVNGDSIDNGTEGSAVRVGLGTQFSFTKNFSAYTDANYLGGGDVDQDWSANDLTGITAKDAQMLSVVKPLQEFELFVLAALESRGTLADILKAAGATTANITQAIEQMRGGESVNDQGAEDQRQALKKYTIDLTERAEQGKLDPVIGRDEEIRRTIQVLQRRTKNNPVLIGEPGVGKTAIVEGLAQRIINGEVPEGLKGRRVLALDMGALVAGAKYRGEFEERLKGVLNDLAKQEGNVILFIDELHTMVGAGKADGAIDAGNMLKPALARGEWHCVGATTLDDIASTVKRCWTSHQHQTKNRTRRTTTRNIRFPNQMIEQINIALEQKGSGNFSAWVIEACRRRLTTGGPHVMYVLHHADKPNLYHGLPENPEISETVKFWKGIWKPLAAVGFAATFAASIFHYERVIFLTGQVEDHMANLIVAQMLFLEAENPEKDIYLYINSPGGVITAGMSIYDTMQFIKPDVSTICMGQAASMGAFLLTAGAKGKRFCLPNSRVMIHQPLGGYQGQATDIEIHAREILKVKGRMNELMALHTGQSLEQIERDTERDRFLSAPEAVEYGLVDSILTHRN

SEQ ID NO: 59910 - protein, 111 aa, Homo sapiens
  misc_feature (1)...(111): Xaa = X or * as defined in Table 2
QYRPESVLEDPRRSDHHRRTDSFRETSFIVQSIVCRVSLSRAILQSKRLXEPGEFPPPDPSSPEQRWPVCYPPKXSDRXPEYPHSPPGRQESQSRYLPAFRHRYSYQTTAY

SEQ ID NO: 59911 - protein, 827 aa, Homo sapiens
  DOMAIN (28)..(57): Respiratory-chain NADH dehydrogenase 51 Kd subunit proteins domain identified by eMATRIX, accession number BL00644A, p-value= 1.474e-30, raw score of 12.40
  DOMAIN (2)..(236): Respiratory-chain NADH dehydrogenase 5 domain identified by PFam, accession name Complex1_51K, E-value=7e-24, PFam score of 92.8
PRKRSLNCWSAKTVTKAARKALTGLSPDEIVNQVKDAGLKGRGGAGFSTGLKWSLMPKDESMNIRYLLCNADEMEPGTYKDRLLMEQLPHLLVEGMLISAFALKAYRGYIFLRGEYIEAAVNLRRAIAEADSRDPRVNKFQDEVGGKLRFGDPGVRLFETSENGLDYFTSVPARFQPQDGKSRIAPYYHLFGSDELSQRAPVFQSRMPQPYIKLNPADAAKLGVNAGTRVSFSYDGNTVTLPVEIAEGLTAGQCRHLTFRDRARCGVALSERRQLRRALQYYAVKYSGRQQYWFGSGDSGRYRITQNVRQLSYSASHDALTHLANRASFEKQLRILLQTSIDAISSGTIDISDGTVLRLTGQDTSVALNASLFNGDGTLVNATDGVTLTGELNTNLETDSLTYLSNVTVNGNLTNTSGAVSLQNGVAGDTLTVNGDYTGGGTLLLDSELNGDDSVSDQLVMNGNTAGNTTVVVNSITGIGEPTSTGIKVVDFAADPTQFQNNAQFSLAGSGYVNMGAYDYTLVEDNNDWYLRSQEVTPPSPPDPDPTFAERIPKTGTTYMNQNLLVTKRDGSTERINLDKIHRVLDWAAEGLHNVSISQVEKPTASLMPPALYDHVVKMVEMGKYDNHLLEDYTEEEFKQMDTFIDHDRDMTFSYAAEKQLEGKYLVQNRVTGEIYDLQALLQKGKTRIAGSDFCKGFAVSGAAVLCSSTVADYLLQFARHLIYSTSMPPLRRRHYVRRWRSFAVMRVMHGAKNWRHSLRVFVPEISTVCWRCCMATVNKQAIAAAFGRAAAHYEQHADLQRQRCDALLAMLPQRKYTHVLDAGCGL

SEQ ID NO: 59912 - protein, 127 aa, Homo sapiens
  DOMAIN (89)..(125): DNA topoisomerase II proteins domain identified by eMATRIX, accession number BL00177B, p-value=8.091e-31, raw score of 19.24
  DOMAIN (11)..(127): DNA topoisomerase II domain identified by PFam, accession name DNA_topoisoII, E-value=1.2e-69, PFam score of 244.9
TMTQTYNADAIEVLTGLEPVRRRPGMYTDTTRPNHLGQEVIDNSVDEALAGHAKRVDVILHADQSLEVIDDGRGMPVDIHPEEGVPAVELILCRLHAGGKFSNKNYQFSGGLHGVGISVVNALSKRV

SEQ ID NO: 59913 - protein, 642 aa, Homo sapiens
  DOMAIN (372)..(410): PHOSPHATE-REPRESSIBLE PHOSPHATE-BINDING PROTEIN domain identified by eMATRIX, accession number DM01866E, p-value=4.938e- 37, raw score of 18.08
  DOMAIN (219)..(458): Phosphate-binding protein domain identified by PFam, accession name PstS, E-value=4.7e-30, PFam score of 113.3
MATAKANQEIQEWLGKYGTARVKLNVDKDFSLKDSSLEMLYPIYDTPTNMLFTQGAIHRTDDRTQSNIGFGWRHFSGNDWMAAVITFIDHDLSRSHTRIGVGAEYWRDYLKLSANGYIRASGWKKSPDIEDYQERPANGWDIRAEGYLPAWPQLGASLMYEQYYGDEVGLFGKDKRQKDPHAISAEHSPEFRSEALKLVNASVLLPQPVNSACMNHNSTTGAVNSKISRRLLNVNWRCLPRLHVSNASWQNGMKSWLSSKRPRHTSEAPEMKYVFIEKHQAEFSIKAMCRVLRVARSGWYTWCQRRTRINIAVVRRADGSRTSFVYTSYLAKVNEEWKNNVGTGSTVKWPIGLGGKGNDGIAAFVQRLPGAIGYVEYAYAKQNNLAYTKLISADGKPVSPTEENFANAAKGADWSKTFAQDLTNQKGEDAWPITSTTFILIHKDQKKPEQGTEVLKFFDWAYKTGAKQANDLDYASLPDSVVEQVRAAWKTNIKDSSVNFDMANVFFRVTPGNFLVNREASHQRRVFAVRAGVDFIYRASSDGLRRCRDRRTRFKRINHAGAPLAGSSLVFNIGIDTVEQAFTTQFRQLAVEIFPGLAEKFIRAIAEAKHGKRGVFQLWRFFGEQELMQRDGFFRRFPFPLR

SEQ ID NO: 59914 - protein, 481 aa, Homo sapiens
  DOMAIN (229)..(267): PHOSPHATE-REPRESSIBLE PHOSPHATE-BINDING PROTEIN domain identified by eMATRIX, accession number DM01866E, p-value=4.938e- 37, raw score of 18.08
  DOMAIN (47)..(315): Phosphate-binding protein domain identified by PFam, accession name PstS, E-value=8.9e-40, PFam score of 145.6
MLMAEYFAIQMCREIKLPLFPGFTERARETLLNYRWPGNIRELKNVVERSVYRHGTSDYPLDDIIIDPFNSVRLKMYRRFRNHLASNTAAGFTASAAQYEDGKQYTTLEKPVAGAPQVLEFFSFFCPHCYQFEEVLHISDNVKKILPEGVKMFDQAGADSKKLPSQYIAGVRRADGSGTSFVFTSYLAKVNEEWKNNVGTGSTVKWPIGLGGKGNDGIAAFVQRLPGAIGYVEYAYAKQNNLAYTKLISADGKPVSPTEENFANAAKGADWSKTFAQDLTNQKGEDAWPITSTTFILIHKDQKKPEQGTEVLKFFDWAYKTGNDRKVMQIDPLEAPDLIWLLQQTGDEVLDYRQAVAYYASCRQTVIEGGNHAFTGFEDYFNPIVDFLEVIDNSVDEALAGHAKRVDVILHADQSLEVIDDGRGMPVDIHPEETCRHARAENDPGDQSHAAIRCDIRQHINGKTHLCLTVNLTIDIVISTI

SEQ ID NO: 59915 - protein, 271 aa, Homo sapiens
  DOMAIN (152)..(181): Peptidase family U7 domain identified by eMATRIX, accession number PF01343B, p-value=9.500e-23, raw score of 15.41
  DOMAIN (137)..(271): Peptidase family U7 domain identified by PFam, accession name Peptidase_U7, E-value=9.5e-21, PFam score of 82.4
  misc_feature (1)...(271): Xaa = X or * as defined in Table 2
MAFNEPLMLEPAYARVFFCALAGQLGITRLTDTVSGITLDAGQIAEPLALFGEDDDMDPRPSRSYQVANGIAVLPVSGTLVSKTRALQPYSGMTGYNGIIARLQQAISDPGVDGILLDMDTPGGMVSGAFDCADIIARMRDIKPIWALANDMNCSAGQLIASSASRRLVTQTARTGSIGVMMAHSNYGAALKTNGVEVTLIYSGDRKVDGNPYEKLPKDVRADFQTRIDATRSAYTGMSVQDVLDTEAAVFSGQESWDNGLAEXLVHTDWL

SEQ ID NO: 59916 - protein, 10 aa, Homo sapiens
DSNSMKPKPC

SEQ ID NO: 59917 - protein, 219 aa, Homo sapiens
  DOMAIN (11)..(219): Fimbrial Usher proteins domain identified by PFam, accession name Usher, E-value=2.6e-78, PFam score of 273.6
PISRFGKHCGPFLTRQGQVRYKWAAGQPGPSMSHQTENETFFSNEVSWGMLSNTSLYGGLLIFDDDYHSAAMGIGQNMLWLGALSFDVTWASSHFDTQQDERGLSYRFNYSKQVDATNSTISLAAYRFSDRHFHSYANYLDHKYNDSDAQDEKQTISLSVGQPITPLNLNLYANLLHQTWWNADASTTANITAGFNVDIGDWRDISISTSFNTTHYEDK

SEQ ID NO: 59918 - protein, 786 aa, Homo sapiens
  DOMAIN (9)..(47): 5 kw NUCLEOSIDE TRANSPORT DEPENDENT NA domain identified by eMATRIX, accession number DM01857D, p-value=1.273e-32, raw score of 16.80
  DOMAIN (574)..(757): Bacterial transcriptional regulator domain identified by PFam, accession name IclR, E-value=7.4e-56, PFam score of 199.0
MAATAMSTVSMSIVGAYMTMLEPKYVVAALVLNMFSTFIVLSLINPYRVDASEENIQMSTCTSWEISPCIGPLDVIADQRHRPITMDISEVLRRASRPAKYSVTVAQNSGRNTQQVGFRRRTANHKRDMVRRAGCSTEGRWVEARESDQQAAKRCYQVANGIAVLPVSGTLVSKTRALQPYSGMTGYNGIIARLQQAISDPGVDGILLDMDTPGGMVSGAFDCADIIARMRDIKPIWALANDMNCSAGQLIASSASRRLVTQTARTGSIGVMMAHSNYGAALKTNGVEVTLIYSGDRKVDGNPYEKLPKDVRADFQTRIDATRQMFAEKVSAYTGMSVQDIYLLKALAARSLQVRPLHLNRDIDINVRIISATHRDLPKAMARGEFREDLYYRLNVVSLKIPALAERTEDIPLLANHLLRQAAERHKPFVRAFSTDAMKRLMTASWPGNVRQLVNVIEQCVALTSSPVISDALVEQALEGENTALPTFVEARNQFELNYLRKLLQITKGNVTHAARMAGRNRTEFYKLLSRHELDDGITEERKCHSSAEMKYGIQLLTLYTTPVVYLFFDRQRMYVTLAGGAFRSCVNKMDLRELARPRLTQLMDTTGLLCHLGIIDNGSAYYILKVESSATISVRSHEGKSLSLYRSGIGKCLLAWQPAAVQQSIIEGLVWEQATPTTITHPQQLHEELARIRRQGWSYDNGEDYADVRCVAAPVFNANNELTAAISVQTSGCHQQHDFARRLSLLRSSFSQLRQLSGSTKYNGQRCAGRKTDDQLIRGPTDYPY

SEQ ID NO: 59919 - protein, 63 aa, Homo sapiens
  misc_feature (1)...(63): Xaa = X or * as defined in Table 2
RGADAGERLNMLTVAEGVETPEQRDGAGRFCSLAKETVTPQWXGVLTSLIIHSEACRIAANDE

SEQ ID NO: 59920 - protein, 96 aa, Homo sapiens
WRIIGIPLLLGYSLVCSRVLLACFWPGSDFWPRSRRKTSHLTVEAFPVVVIFVSWRNPQVAPTSAHQNRPSRNPVSRPPNTQRVARRKHYALADGY

SEQ ID NO: 59921 - protein, 62 aa, Homo sapiens
GDIMSQVTENKVISAPVPMTPLQEFWHYFKRNKGAVVGLVYVVIVLFIAIRGYRARFCTRGH

SEQ ID NO: 59922 - protein, 247 aa, Homo sapiens
  DOMAIN (209)..(222): Thioredoxin family proteins domain identified by eMATRIX, accession number BL00194, p-value=3.571e-16, raw score of 12.16
  DOMAIN (1)..(132): DedA family domain identified by PFam, accession name DedA, E -value=4.4e-38, PFam score of 140.0
SLETNDLNVHMMVVLMLIAAIVGDAVNYTIGRLFGEKLFSNPNSKIFRRSYLDKTHQFYEKHGGKTIILARFVPIVRTFAPFVAGMGHMSYRHFAAYNVIGALLWVLLFTYAGYFFGTIPMVQDNLKLLIVGIIVVSILPGVIEIIRHKRDFTVVDPPPGPSPARPRAPQRFCSARIARQVHASGNNKGTRLTDDSFDTDVLKADGAILVDFWAEWCGPCKMIAPILDEIADEYQGKLTVAKLNIDQ

SEQ ID NO: 59923 - protein, 30 aa, Homo sapiens
RSMAVALFRVQPGYVLVPPPAWPVRCAPAE

SEQ ID NO: 59924 - protein, 59 aa, Homo sapiens
ERRFKKQLSVYSAVIGDIFIFWAPIPLVPVPSLCHSYIDYLLCVLLGGLLRQALRRCRG

SEQ ID NO: 59925 - protein, 352 aa, Homo sapiens
MKLMCIDGYNNRYTWEMMHIGEMSDEELFGERRNIDRSERRIDSHAATCWFHPHQHGKTGRQVAMGLAGLVVIEDDEILKLMLPKQKGFAHGNARDLNNPQTGKTGAFYCVAKPNKKIFDYALEQAGKNDRSRVLLVGCLVVVLSLIMGVILGLIAGYFGGLVDNIIMRVVDIMLALPSLLLALVLPTTGTRKRNYQGERILYLPKRSTAAGPTFFRKENPEELNNDTTLKKVMKPLITSNTVTDEIERANVFKMTGKWYLFTDSRGSKMTIDGINSNDGYSRRETGRRRRLPRTSPKNGGITCQSGFRASNVLLTNKGDVMLGLKQVHHIEINATDYATIAGHRHQMKQKA

SEQ ID NO: 59926 - protein, 70 aa, Homo sapiens
RKVSISSYLAPSVSLKLSVRCSKHTWCKSWKSKKRGTVAVRRWGWWLKLKPGTIFLCALVAGRFSLLCAI

SEQ ID NO: 59927 - protein, 906 aa, Homo sapiens
  DOMAIN (471)..(483): ABC transporters family proteins domain identified by eMATRIX, accession number BL00211A, p-value=2.350e-09, raw score of 12.23
  DOMAIN (814)..(882): Integrase core domain identified by PFam, accession name rve, E-value=2.5e-05, PFam score of 22.4
MTRTLKPLILNTSALTLTLILIYTGISAHDKLTWLMEVTPVIIVVQLLLATARRYPLTPLLYTLIFLHAIILMVGGQYTYAKVPVGFEVQEWLGLSRNPGTELIVVSKAVQPPPEPVVEPEPEREPIPEPPKEAPVVIEKPKPKPKPKPKPVKKVQEQPKRDVKPVESRPASPFENTAPARLTSSTATAATSKPGTQKLTQPQLENDSYAKEKPFKSIPKFPVNFLSSTWQEGGSMAHLLGTDDVGRDVLSRLMYGARLSLLVGCLVVVLSLIMGVILGLIAGYFGGLVDNIIMRVVDIMLALPSLLLALVLVAIFGPSIGNAALALTFAGLPHYVRLTRAAVLVEVNRDYASLGFSNAILDMAALGFLGMGAQPPTPEWGTMLSDVLQFAQSAWWVVTFPGLAILLTVLAFNLMGDGLRDALDPKLKHKRFEMALLNVDKLSVHFGDESAPFRAVDRISYSVKQGEVVGIVGESGSGKSVSSLAIMGLIDYPGRVMAEKLEFNGQDLQRISEKERRNLEVSKFRCMQRERLIRHLNIRSYMRRFQQPSSWIDGTRSSCASSAPSRRLRGMAGNADASIDNHRHCGLLDNNLQHGAGFQSLIRANRRAERHHRCTADFFQTFTQYRIGPAVRQHDKSLLYQRFGGFQGFDGIGQQPAGVRQGHTRRDKRFEDSVVVLAQVDTFHRQCHQLAAGSADRGDPPRATAELQISPSSYFWFRQELHVILRRTDDWMDGRRSRHTDDTDVLLRIHHVIGELPTYGYRRVWALLRRQAELDGMPAINAKRVYRIMRQNALLLERKPAVPPSKRAHTGRVAVKESNQRWCSDGFEFCCDNGERLRVTFALDCCDREALHWAVTTGGFNSETVQDVMLGAVERRFGGSPEFSQTVWSGLKMIKSVPSWCRSYKY

SEQ ID NO: 59928 - protein, 117 aa, Homo sapiens
LYWGIRWFVLECFWPAFGLVPIFGREAGEKPMAPPPSRATLFTSHLTVEAFPVWSYLYPGETPRLHPRAHTRTVPAAIRYPDRQTPNGLRGANTCRAGVVPRMSFEAYRSSQYSDFV

SEQ ID NO: 59929 - protein, 435 aa, Homo sapiens
  misc_feature (1)...(435): Xaa = X or * as defined in Table 2
KYGFVHYTLHTLGGTARALVATDYRPLTKLSLDNGFQTVDHLQISQCPYIPPYNFPTDTSPGTPGLLQPPEGHAYDAYWRCVRAVRGQRVSALHGPPVHLRSVYPSASAXWFAPRNPLGVWRSGYRIAPGYGSGVRSWVQPGGFARYKYDQTGNASTVKCDYYRMAAFGHHAYRMQALTCSMTACPCTTRQETSSAWGSVSSMGDSRPPQEILGQPLLGRRIKYNCTGIGPWDGKGDESGASRPRKQQASGWLWACPRIFLVIPHSSHPAARRTNGSVGGSNRNRFVIITGPGPQLAPKGLWQWPIGQDPVTEIATLIGTHDLIMFDCIGSVSAPTIQPLEKLLSIVRYPAQVGLFFATRRCQAGATGKQSQQRNPVLFIFYQRGISVFTSAFAPVAVTAPPRQSRRQFPRLSPLDAHQRMGDVSIQAVKEARTC

SEQ ID NO: 59930 - protein, 782 aa, Homo sapiens
  DOMAIN (104)..(138): RsuA family of pseudouridine synthase proteins domain identified by eMATRIX, accession number BL01149C, p-value=8.091e- 29, raw score of 17.63
  DOMAIN (68)..(195): RNA pseudouridylate synthase domain identified by PFam, accession name PseudoU_synth_2, E-value=1.2e-28, PFam score of 108.6
  misc_feature (1)...(782): Xaa = X or * as defined in Table 2
MLPDSSVRLNKYISESGICSRREADRYIEQGNVFLNGKRATIGDQVKPGDVVKVNGQLIEPREAEDLVLIALNKPVGIVSTTEDGERDNIVDFVNHSKRVFPIGRLDKDSQGLIFLTNHGDLVNKILRAGNDHEKEYLVTVDKPITEEFIRGMSAGVPILGTVTKKCKVKKEAPFVFRITLVQGLNRQIRRMCEHFGYEVKKLERTRIMNVSLSGIPLGEWRDLTDDELIDLFKLIENSSSEVKPKRRPNRKQRASNVQSLRWKKRRKKAVARRPTQSSDDAIRGQQPDGVDCRDCRAGERQRQQTDSAMMELMVVHPHIFWLSLGGLLLAAEMLGGNGYLLWSGVAAVITGLVVWLVPLGWEWQGVMFAILTLLAAWLWWKWLSRRVREQKHSDSHLNQRGQQLIGRRFVLESPLVNGRGHMRVGDSSWPVSASEDLGAGIRQCQQLVAHGLQLLNVSFDLRHLFQRGRLEFGCALRLLTDSQSRLSRKPRGWRGLYGYSPPCGDIVRYHHHDLSVATLHVHINHDDCLEIAVLKGDMGDVQHFADDVIAQRGFFFAFSYEDTVIKIIEKDFTMSGKPAARQGDMTQYGGSIVQGSAGVRIGAPTGVACSVCPGGVTSGHPVNPLLGAKVLPGETDIALPGPLPFILSRTYSSYRTKTPAPVGSLGPGWKMPADIRLQLRDNTLILSDNGGRSLYFEHLFPGEDGYSRSESLWLVRGGVAKLDEGHRLAALWQALPEELRLSRIVIWRQTVRGAVVAARLVXAGAGKRMRCLLRRCRRTGY

SEQ ID NO: 59931 - protein, 1025 aa, Homo sapiens
  DOMAIN (967)..(1010): Domain of Unknown Function 2 domain identified by eMATRIX, accession number PF00563C, p-value=5.154e-36, raw score of 26.21
  DOMAIN (2)..(46): Helix-turn-helix protein, copG family domain identified by PFam, accession name HTH_4, E-value=4e-11, PFam score of 50.4
MQRVTITLDDDLLETLDSLSQRRGYNNRSEAIRDILRSALAQEATQQHGTQGFAVLSYVYEHEKRDLASRIVSTQHHHHDLSVATLHVHINHDDCLEIAVLKDTVIKIIEQDFTMSGKPAARQGDMTQYGGSIVQGSAGVRIGAPTGVACSVLPGGVTYGHPVKSLLGARVLLACFWPGSDFWPRSRRKTYGTAPQSCYSFYVALDCGGVSRLVIFVSWRNPQVAPTSAHQNRPSRNPVSRPPNTQRVARTLEDPPHMILPALCWVLFQLAVIVRMTRSSMLEVLGEDYIRTARAKGLTRMRVIIVHALRNAMLPVVTVIGLQVGTLLAGAILTETIFSWPGLGRWLIDALQRRDYPVVQGGVLLVATMIILVNLLVDLLYGVVNPRIRHKNAPVPMTPLQEFWHYFKRNKGAVVGLVYVVIVLFIAIFANWIAPYNPAEQFRDALLAPPAWQEGGSMAHLLGTDDVGRDVLSRLMYGARLSLLVGCLVVVLSLIMGVILGLIAGYFGGLVDNIIMRVVDIMLALPSLLLALVLVAIFGPSIGNAALALTFVALPHYVRLTRAAVLVEVNRDYVTASRVAGNTRSPFITVVRSPLTTDGSRVDPDGIFTVANLMGSEMSMAPHPMTEGVYTYGPVAKLDADSPGFNNSQITLLKGWHCGERNIVGSLMEVGAHNSRKLDSRVAGGKGQNAGGSNGKAEGLYLVAVDYPDRYLDKTHQFYEKHGGKTIILARFVPIVRTFAPFVAGMGHMSYRHFAAYNVIGALLWVVIEYTPPILLSEVSSIRCRSSVEVYLAGQLTPHGDQHFFRCPKTGKLGQFTLQQVYWCIQVFDASGLQPYFLLYYILQLVDNFQQPVDCQLVNDLAKIQLSLVLESFKADIQKLLTSLPAHHFQIVLEITERDMLKEQEATQLFAWLHSVGVEIAIDDFGTGHSALIYLERFTLDYLKIDRGFINAIGTETITSPVLDAVLTLAKRLNMLTVAEGVETPEQARWLSERGVNFMQGYWISRPLPLDDFVRWLKKPYTPQW

SEQ ID NO: 59932 - protein, 188 aa, Homo sapiens
PRPFSPIMASAWKRKSSPRTKRQTCQTSPKPLPARVAGNGTSVRLRHSRICWMNALPGAAWNCISTLKKAISPAPRCLPTASTPRRWKPSPDDCKAACTAQICCNRSAKRCWLTSRNRKKSFSSICRIFSGISCAMWRNASLIRGSLATVCQNCCASGIAVNQALLLTLRSNFTSMAASRSIPALFGA

SEQ ID NO: 59933 - protein, 60 aa, Homo sapiens
LATADDQPFAVMRRLTLQDNPAIARVIRQVSAEYGLTADKGYTVADPNLDELYQVYSQRG

SEQ ID NO: 59934 - protein, 84 aa, Homo sapiens
YRLYLPQSPLQSSSSPEPRPHPYAGRITSHPESNRAPHSHSRKERNPKTRATAPRDQPDGGPTTQRAPPHAQDAATGGGNATQI

SEQ ID NO: 59935 - protein, 102 aa, Homo sapiens
  misc_feature (1)...(102): Xaa = X or * as defined in Table 2
TPGLTKTPCPWEKVTLFSLQWSAYRQANTSGLRHSASSLLPLACRYXRXWRWQKLAAVLTASARQSVKSLAYCWQRFVTWRWGRFSLRRVQLPFPLKWGLRR

SEQ ID NO: 59936 - protein, 533 aa, Homo sapiens
NGLRSMIMAAVPGQKLVHCNKKYKNTGHQGMPQRHHQGHKRTPKQLALIIKRCLPMVLTGSGMLCTTANAEEYYFDPIMLETKKSGNSSRGPFGPFYQNQLCTNMRTRNLLNLATLIANRREPLDSQHHNSTEEGRNATHETTRTQSELDNTQSEAPTSKPGEFTRNAEGGFAARAKQLNLELDDAANQVLCYCYEGNLLALAQALERLSLLWPDGKLTLPRVEQAVNDAAHFTPFHWVDALLMGKSKRALHILQQLRLEGSEPVILLRTLQRELLLLVNLKRQSAHTPLRALFDKHRVWQNRRGMMGEALNRLSQTQLRQAVQLLTRTELTLKQDYGQSVWAELEGLSLLLCHKPLADALFGGTFDPVHYGHLKPVETLANLIGLTRPEANSVQRKHMLELAIADKPLFTLDERELKRNAPSYTAQTLKEWRQVVPILTSIWSRKVKARAAKIEILGKIQAYPERKPSAIAKIQVDGELMLTELGLEGDEQAEKKVHGGPDRALCHYPREHYLYWAREFPEQAELFVAPAFG

SEQ ID NO: 59937 - protein, 158 aa, Homo sapiens
MQSIRPPDCLSVHLNPNVREPVNRILGHVKNVILIDPQEYLPFVWLMNHAWLILTDSGGIQEEAPSLGKPVLVMRDTTERPEAVTAGTVRLVGTDKQRIVEEVTRLLKDENEYQAMSRAHNPYGDAAFASRQKQVIGVDINQHAVDTFNRGDIAYRRT

SEQ ID NO: 59938 - protein, 149 aa, Homo sapiens
  misc_feature (1)...(149): Xaa = X or * as defined in Table 2
KTKTNIKLXAAPITRMVMVRHAPHSGSVKKXSDITMSFATISVIGLGYIGLPTAAAFASRQKQVIGVDINQHAVDTINRGEIHIVEPDLASVVKTAVEGGFLRASTTPVEADAWLIAVPTPFKGDHEPDMTYVESAARSIAPVLKKGAL

SEQ ID NO: 59939 - protein, 185 aa, Homo sapiens
CSSDSVRCSVGDIVAFQVKERYHNHAVEVRAQTGARTMYTSLCRPSDDIRLYVSLSHITSSTVSHTRRHHTISHYNASHYGTINQHAVDTINRGEIHIVEPDLASVVKTAVEGGFLRASTTPVEADAWLIAVPTPFKGDHPFMRSELGIQGDSDPGHGGHATQAPEAQLAVRPCGHPGANTDPKT

SEQ ID NO: 59940 - protein, 46 aa, Homo sapiens
  misc_feature (1)...(46): Xaa = X or * as defined in Table 2
RGRSNSGSTSSVTSPVYTXXPTAQGLSARQGCTKGHQVRRYGFRHD

SEQ ID NO: 59941 - protein, 101 aa, Homo sapiens
DAPDRQSGCPGAWWRCLPSRGIGAAIVRRFVTDGANVRFTYAGSKDAAKRLAQETGATAVFTDSADRDAVIDVVRKSGALDIRQVPFTPPHPFCHPAAQRS

SEQ ID NO: 59942 - protein, 330 aa, Homo sapiens
  DOMAIN (184)..(222): Short-chain dehydrogenases/reductases family proteins domain identified by eMATRIX, accession number BL00061B, p-value=5.320e- 15, raw score of 25.79
  DOMAIN (65)..(240): short chain dehydrogenase domain identified by PFam, accession name adh_short, E-value=2.2e-61, PFam score of 217.4
MTLEALQDTFAAEIACSGAKRLGRPGTRDCFLVTITKPVDRKLKQFCNACYIINQGVLMGAFTGKTVLILGGSRGIGAAIVRRFVTDGANVRFTYAGSKDAAKRLAQETGATAVFTDSADRDAVIDVVRKSGALDILVVNAGIGVFGEALELNADDIDRLFKINIHAPYHASVEAARQMPEGGRILIIGSVNGDRMPVAGMAAYAASKSALQGMARGLARDFGPRGITINVVQPGPIDTDANPANGPMRDMLHSLMAIKRHGQPEESLLYHAGILPRQKAIILGSFSGSTPNDYDAGYNLESVYAFLRSRLSIPLITGLDFGHEQRTVTL

SEQ ID NO: 59943 - protein, 131 aa, Homo sapiens
  DOMAIN (69)..(81): RsuA family of pseudouridine synthase proteins domain identified by eMATRIX, accession number BL01149B, p-value=5.500e- 14, raw score of 15.26
  DOMAIN (1)..(46): S4 domain identified by PFam, accession name S4, E-value= 0.01, PFam score of 21.8
LQKVLARAGHGSRREIESIIEAGRVSVDGKIAKLGDRVEVTPGLKIRIDGHLISVRESAEQICRVLAYYKPEGELCTRNDPEGRPTVFDRLPKLRGARWIAVGRLDVNTCGLLLFTTDGELILLLQHRQLR

SEQ ID NO: 59944 - protein, 1251 aa, Homo sapiens
  DOMAIN (646)..(678): ABC transporters family proteins domain identified by eMATRIX, accession number BL00211B, p-value=1.750e-19, raw score of 13.37
  DOMAIN (552)..(721): ABC transporter domain identified by PFam, accession name ABC_tran, E-value=9e-13, PFam score of 55.9
MTARGGFLRDGRKLGEINRERLFRAVYDLSSDYVNMFQRNVFGFRYQPQCQQDKQYVQSRIHPEGVGVTQRVEHGQERCANDHVGNPVGGSGAGDAKIAAFQRLNFGAQYPNQRTGTHGKTDNKHQQHGDGEILRRRRVNTDMHHCTEYAHASRHRQEAQPVNKADCDKGGKYVGQADNHGPPHLLGSAGITVRSKISARNNDDTPGKATPKGSSMSEKLQKVLARAGHGSRREIESIIEAGRVSVDGKIAKLGDRVEVTPGLKIRIDGHLISVRESAEQICRVLAYYKPEGELCTRNDPEGRPTVFDRLPKLRGARWIAVGRLDVNTCGLLLFTTDGELANRLMHPSREVEREYAVRVFGQVDDAKLRDLSRGVQLEDGPAAFKTIKFSGGEGINQWYNVTLTEGRNREVRRLWEAVGVQVSRLIRVRYGDIPLPKGLPRGGWTELDLAQTNYLRELVELPPETSSKVAVEKDRRRMKANQIRRAVKRHSQVSGGRRSGGRKARCHHLNSRHVLQQSAFGPSLVTPRLPRQLYQSPAYPPECRAAFVRWSNGLRTLRGGRIMLNGKEINKLSTGERLLRGLVYLPEDRQSSGLNLDASLAWNVCALTHNLRGFWAKTAKDNATLERYRRALNIKFNQPEQAARTLSGGNQQKILIAKCLEASPQVLIVDEPTRGVDVSARNDIYQLLRSIAAQNVAVLLISSDLEEIELMADRVYVMHQGEITHSALTERDINVETIMRVAFGDSQRGVMLKFIQNNREITALLAVVLLFVLPGFLDRQYLSVQTLTMVYSSAQILILLAMGATLVMLTRNIDVSVGSITGMCAVLLGMLLNAGIHNLWLVSHLLLFPTLAWGDPTLPSALRRFTSEFGMGSGGTTALRPPGKFCFIRPLLRSDLICIRLKIFSHPPKQLRRYRDRTVSRRSKPSSRTTLNGEQPYPWDLLQPQDVMSRHRGAKHRRRYELLGGLANLRAPPLLFRRRPPQSNYPPDTVRNPDYGSTLEHQTLKAGISRSAPCRLASTLQSLPPILHIRDGRGSPAKVNDTGHFTSVDAAHFDFCSDLFDTTNSMFRFLAVGRCNLHSTVIFDFDGGASFFGQSTDYRTAFTDNIFDLVRVDLDGMDTRICRRAPFSLVQRNLHDLFGDTFNFDIHLQCRDTVAGTCNFEVHIAQVIFVAQNVRQYNVVVAFFHQTHCDTRNGSFDRHTCVHQRQRRAAHGSHRRGTVGFSDFRHNTYGVREFVHIRHDCTARRASPRRP

SEQ ID NO: 59945 - protein, 366 aa, Homo sapiens
  DOMAIN (139)..(173): RsuA family of pseudouridine synthase proteins domain identified by eMATRIX, accession number BL01149C, p-value=4.750e- 33, raw score of 17.63
  DOMAIN (104)..(234): RNA pseudouridylate synthase domain identified by PFam, accession name PseudoU_synth_2, E-value=5e-06, PFam score of 9.1
MQGKIEQHGTRGSGYEPKTKTTGTELEVVSTDRAKSISNAWEGDTKVSSMSEKLQKVLARAAHGSCREIESIIKPARVSVDGTIAKLGDRVEFTLGLKIRIDGHVISVHEVCTGNDPKARPTVFDRLPKLRGARWIAVGRLDVNTCGLMLFTTDGELANRLMHPSREVEREYAVRVFGQVDDAKLRDLSRGVQLEDGPAAFKTIKFSGGEGINQWYNVTLTEGSNREVRHGVRKPATPLLPGNTLAIFLPLTGVLCVVLLAILADQSTINSEALINSLTMGLVATFIALLLLLLWLEWGPQRRQLWLWLPILLPALPLVAGQYTLALWLKLDGSWTAVVWGHLLWVMPWMLFILQPAWQRIDSRLI

SEQ ID NO: 59946 - protein, 127 aa, Homo sapiens
GRLNSLENMTASTPPFWSAIRSSQALSITQFIPNCASKLGSPGNARRWHMAMTAFSVPITSFSQLIESTRKNSTTLATIPTATTTPIIPSDINSEIDQPNILPTDNAEICALSPAKLKPPLSAISVK

SEQ ID NO: 59947 - protein, 223 aa, Homo sapiens
  DOMAIN (74)..(114): Amino acid permeases proteins domain identified by eMATRIX, accession number BL00218E, p-value=2.929e-29, raw score of 23.30
  DOMAIN (1)..(223): Amino acid permease domain identified by PFam, accession name aa_permeases, E-value=4.7e-09, PFam score of -95.7
AAFLRECKDPQTMVPKAINSVIWRIGLFYVGSVVLLVMLLPWSAYQAGQSPFVTFFSKLGVPYIGSIMNIVVLTAALSSLNSGLYCTGRILRSMAMGGSAPSFMAKMSRQHVPYAGILATLVVYVVGVFLNYLVPSRVFEIVLNFASLGIIASWAFIIVCQMRLRKAIKEGKAADAHFTPYHATPLRNVMLHIYVLNGVSRFSVIDTNQIAQRCNRFALLCGA

SEQ ID NO: 59948 - protein, 85 aa, Homo sapiens
  DOMAIN (7)..(41): Tropomyosins proteins domain identified by eMATRIX, accession number BL00326A, p-value=1.000e-29, raw score of 14.01
  DOMAIN (12)..(83): Tropomyosins domain identified by PFam, accession name Tropomyosin, E-value=3.3e-40, PFam score of 127.8
MAGLNSLEAVKRKIQALQQQADEAEDRAQGLQRELDGERERREKAEGDVAALNRRIQLVEEELDRAQERLATALQKLEEAEKACR

SEQ ID NO: 59949 - protein, 407 aa, Homo sapiens
  DOMAIN (120)..(165): Amino acid permeases proteins domain identified by eMATRIX, accession number BL00218D, p-value=4.536e-33, raw score of 21.49
  DOMAIN (6)..(380): Amino acid permease domain identified by PFam, accession name aa_permeases, E-value=2.3e-24, PFam score of 94.4
RGYPATGTPPTIQQGANPTNISIPNTLMAAKTTTTASMQINLNSSDPLPTVTPFSASNADSYNKKGSVTVFDSQGVGTVFLGSGQPLDGNTTGFHLITDNGGFFPHGLLPALVLIQGVVFAFASIEMVGTAAGECKDPQTMVPKAINSVIWRIGLFYVGSVVLLVMLLPWSAYQAGQSPFVTFFSKLGVPYIGSIMNIVVLTAALSSLNSGLYCTGRILRSMAMGGSAPSFMAKMSRQHVPYAGILATLVVYVVGRILNYLVPSRVFEIVLNFASLGIIASWAVIIVARKLVILEGELERAEERAEVSELVWRDNTSPGAAQLIARLLDSLGKAEGILGTIAGDDTIFTTPANGFTVKDLRYPLTPLLYTLIFLHAIILMVGGQYTYAKVPVGFEVQEWLGLSRTSV

SEQ ID NO: 59950 - protein, 123 aa, Homo sapiens
MLFSIHNFNQGVIMAGWFELSKSSDNQFRFVLKAGNGETILTSELYTSKTSAEKGIASVRSNSPQEERYEKKTASNGKFYFNLKAANHQIIGSSQMYATAQSRETGIASVKANGTSQTVKDNT

SEQ ID NO: 59951 - protein, 85 aa, Homo sapiens
  misc_feature (1)...(85): Xaa = X or * as defined in Table 2
CWPGKMSWGGFPLFLLIGIVSEGIVPAPPCTSGRIQLXIRLVLDFFWLVGYXLLPQFQSLLLVYSGIQLLPGLVLGGCMCRGIYA

SEQ ID NO: 59952 - protein, 184 aa, Homo sapiens
  misc_feature (1)...(184): Xaa = X or * as defined in Table 2
GVDNWRIIPIISARLQRXAGSFFSFLGETGSLSCGLSLSFKSCCEAKNCSGSRGSSPGXIPGVQEWNQIFSRFHGVGLASLRKQRAPGDQSPTGLLGEXAHGEIPVGNGRSGKTRARGGPRGLEVSWSGSLTHSRGXASLTSSHNSCHIRRGHGPQKRSGDMTHASAGHXAEVILAAPRRSCPL

SEQ ID NO: 59953 - protein, 496 aa, Homo sapiens
  DOMAIN (105)..(150): kw TRANSCRIPTASE REVERSE II ORF2 domain identified by eMATRIX, accession number DM01354N, p-value=1.000e-40, raw score of 13.17
  DOMAIN (189)..(464): Reverse transcriptase domain identified by PFam, accession name rvt, E-value=1.8e-77, PFam score of 270.8
ERYKIDTLTSQLKELEKQEQTYSKASRRREITKIRAELKEIETQKTLQKINESRSWVFEKINKTDRSLARLIKRKREKNQIVAIKNDKGDITTDPTEIQTTIREYYKHLYTNKLENLEEMDKFLDTYTLPRLNQEEVESLNRPITGSEIEALINSLPTKKSPGPDGFTAEFYQRYKEELVPFLLKLFQSIEKEGILPNSFYEANIILIPKPGRDTTKKENFRPISLMNIDAKILNKILANRIQQHIKKLIHYNQVSFIPGIQGWFNICKSINVIQHINRTKDKNHTIISIDAEKAFDKIQQPFMLKTLNKLGIDGTYLKIMTAIYDKPTASTILNGQKLEAFPLKTGTRQGCPLSPLLFNIVLEVLARAIRQEKEIKGIQLGKEEVKLSLFADDMIVYLENPIVSAQTLLKLISNFSKISGYKINVQKSQVFPYTNNRQTESQIMSELLFTIASKRIKYVGIQLTRDVKDLFKENYKPLLKEIKEDTNKWKDILCS

SEQ ID NO: 59954 - protein, 467 aa, Homo sapiens
  DOMAIN (243)..(277): Glutamate 5-kinase proteins domain identified by eMATRIX, accession number BL00902C, p-value=3.903e-29, raw score of 18.87
  DOMAIN (133)..(294): Amino acid kinase family domain identified by PFam, accession name aakinase, E-value=1.1e-25, PFam score of 98.7
MPWADKRNPSGAQSLNGYAPPDLIWGPSHRAFRAQVEYSIGISSIYNSGTHTLPILNQEDFESLNRPITGSEIEAIINSLPSKKSTGPDRFTAEFYQKYNKELPLWDIFAKICSIPHPSYHEEQLAEYIVGWAKEKGFHVERDQVVFQALIHLVKGNMGTGILGLPHRCEERGHPGQSRLIQLWEQLFSIYGIHVGQMLLTRADMEDRERFLNARDTLRALLDNNIVPVINENDAVATAEIKVGDNDNLSALAAILAGADKLLLLTDQKGLYTADPRSNPQAELIKDVYGIDDALRAIAGDSVSGLGTGGMSTKLQAADVACRAGIDTIIAAGSKPGVIGDVMEGISVGTLFHAQATPLENRKRWIFGAPPAGEITVDEGATAAILERGSSLLPKGIKSVTGNFSRGEVIRICNLEGRDIAHGVSRYNSDALRRIAVISALWESESGRSRGQEIKTILANMVKPHIY

SEQ ID NO: 59955 - protein, 51 aa, Homo sapiens
YDQAELDQLIHGSSSNEQDPRRLPKGLTPQTLRTLCQWIDAHQDYEFSTDG

SEQ ID NO: 59956 - protein, 609 aa, Homo sapiens
  DOMAIN (38)..(60): CYTOSOL AMINOPEPTIDASE SIGNATURE domain identified by eMATRIX, accession number PR00481C, p-value=7.000e-22, raw score of 14.47
  DOMAIN (1)..(143): Cytosol aminopeptidase family domain identified by PFam, accession name Peptidase_M17, E-value=2.9e-16, PFam score of -32.6
MDEMKYDMCGAAAVYGVMRMVAELQLPINVIGVLAGCENMPGGRAYRPGDVLTTMSGQTVEVLNTDAEGRLVLCDVLTYVERFEPEAVIDVATLTGACVIALGHHITGLMANHNPLAHELIAASEQSGCFLSRFTRKYNWAHLDIAGTAWRTGFWRNSSVFGNRSKQKRGNDISADAPSGGEDICHIKLNIIISQFRMSGQPSPWYLAILLQNPMFVGESLTDPNSLFAQIVHIIEEGGWTVFRNMPLIFAVGLPIGLAKQAQGRACLAVMVSFLTWNYFINAMGMTWGSYFGVDFTQDAVAGSGLTMMAGIKTLDTSIIGAIIISGIVTALHNRLFDKKLPVFLGIFQGTSYVVIIAFLVMIPCAWLTLLGWPKVQMGIESLQAFLRSAGALGVWVYTFLERILIPTGLHHFIYGQFIFGPAAVEGGIQMYWAQHLQEFSLSAEPVKSLVPDVGPPDAATIKDSLHYGVVDYLIKPFQASRFEEALTGWRQKKMALEKHQYYDQAELDQLIHGSSSNEQDPRRLPKGLTPQTLRTLCQWIDAHQDYEFSTDELANEVNISRVSCRKYLIWLVNWHILFTSIHYGVTGRPVYRYRIQAEHYSLLKEYCQ

SEQ ID NO: 59957 - protein, 292 aa, Homo sapiens
  DOMAIN (104)..(118): Response regulator receiver domain proteins domain identified by eMATRIX, accession number PF00072A, p-value=1.964e-10, raw score of 9.42
  DOMAIN (55)..(170): Response regulator receiver domain identified by PFam, accession name response_reg, E-value=1.2e-20, PFam score of 82.1
QGCLDKRNRLRRRLSTCRPPGRNSRRQHRRGIGTRDFHTIFCPDTLGRGEVDQMINVLIIDDDAMVAELNRRYVAQIPGFQCCGTASTLEKAKEIIFNSDTLIDLILLDIYMQKENGLDLLPVLHNARCKSDVIVISSAADAATIKDSLHYGVVDYLIKPFQASRFEEALTGWRQKKMALEKHQYYDQAELDQLIHGSSSNEQDPRRLPKGLTPQTLRTLCQWIDAHQDYEFSTDELANEVNISRVSCRKYLIWLVNCHILFTSIHYGVTGRPVYRYRIQAEHYSLLKQYCQ

SEQ ID NO: 59958 - protein, 94 aa, Homo sapiens
PKAMLYSSATGPGIANHGFSGAGASSGDNPQMALAKDNEQDMIVKEMYDRAAEQLIRKLPSIRAADIRSDEEQTSTTTDTPATPARVSTTRAWR

SEQ ID NO: 59959 - protein, 70 aa, Homo sapiens
  misc_feature (1)...(70): Xaa = X or * as defined in Table 2
SPAASLYVTGSDLCTARMGGLVTRTGGLSRRAAYPLCHPPSGSRPSATSRASVDSGXTCGELGDAGTRAN

SEQ ID NO: 59960 - protein, 102 aa, Homo sapiens
AGKFCSSNTLMVASAAAQASGLPPKVVVCRNGLPNRTENTSSVAMVAPIGITPPPSRFGKAEDIQLYVLMLTNPTSLAVPPMPVCPSSEDNWWGRSFFALSC

SEQ ID NO: 59961 - protein, 567 aa, Homo sapiens
QHAGHCRHRFPHTTACIPTFHHAFSLFADCIRPPPFSPSALLRCSTAARLVTVCRVISPKSNCTMYSLSEFTSAISAYPNNILSRQTQLSQDRDTHSAVQPAVYPESTLALLVADGREPDGGWQSGYAARRDNPPVRVTRPPMRAVQRIRAMNQAWAMINMPLTKPSRREIFSQRWEMTLCCFNQRVNSLVTNRRTWVTVCQTTHMLLDRHPRHLATYPKFAHITRESERQTCLVERNGKMLEDIPLETPPPICTITRPLTKNKPTTMNHASNTESQDQGWRRRQTQETKGHKLTTRLQTKETRERPPTIREHRTNHLTVTSSLTYTYGRPLEKPTADREPTPPSNEQHRDTSNANHHNPYKRSKHQQNAREGSVRYLATLLLSLAVLITAGCGWHLRDTTQVPSTMKVMILDSGDPNGPLSRAVRNQLRLNGVELLDKETTRKDVPSLRLGKVSIAKDTASVFRNGQTAEYQMIMTVNATVLIPGRDIYPISAKVFRSFFDNPQMALAKDNEQDMIVKEMYDRAAEQLIRKLPSIRAADIRSDEEQTSTTTDTPATPARVSTTLGN

SEQ ID NO: 59962 - protein, 33 aa, Homo sapiens
RRHNHRYHHAPQQCPAAADPADLQVSLWPGLND

SEQ ID NO: 59963 - protein, 348 aa, Homo sapiens
  DOMAIN (226)..(258): ABC transporters family proteins domain identified by eMATRIX, accession number BL00211B, p-value=3.500e-23, raw score of 13.37
  DOMAIN (105)..(299): ABC transporter domain identified by PFam, accession name ABC_tran, E-value=2.6e-35, PFam score of 130.8
MATFRRMTGDNPDAPRWLRYPGFIPQLRNNADSVIFINQIQGLLADERYLSLLNCELSRFTDDYDASVPAGEIIIVPWMELQVHNGHESAPFRAVDRISYSVKQGEVVGIVGESGSGKSVSSLAIMGLIDYPGRVMAEKLEFNGQDLQRISEKERRNLVGAEVAMIFQDPMTSLNPCYTVGFQIMEAIKVHQGGNKSTRRQRAIDLLNQVGIPDPASRLDVYPHQLSGGMSQRVMIAMAIACRPKLLIADEPTTALDGDHSSANHRTTAGATTEREHGAGVTHPPRFVTKQWLCFLPDGLLLFAEARFVIWQMQPAVMAVDVAAFAHLFNQQQYQRFIFHWQRHTSQT

SEQ ID NO: 59964 - protein, 173 aa, Homo sapiens
  misc_feature (1)...(173): Xaa = X or * as defined in Table 2
FTWIGFYANRHFHCPVTTNDFPHFMKWRAAAHGGENIAFKLANLPFFGDIRESHYQVVINRADRGFNPDFFTGARQQQKFVLIAGGFPXQLLXTNAVIGREFRNVQECIGLHTAGFANAVTKHFWXMPRLHCTIWRSGSRTITGRSRWSTAIINCRVCSFCAISTLASRTSAR

SEQ ID NO: 59965 - protein, 104 aa, Homo sapiens
PGRVSGKADGSVLAGNGLLPGFFCPLRLRGKYQPEVIASTIRRRYQLLFLAVASHQATAAGCGVNALSDLRLCSVCRPDKTHSVASGNGCRMRALPSSPFSVIL

SEQ ID NO: 59966 - protein, 463 aa, Homo sapiens
  DOMAIN (49)..(76): PEP-utilizing enzymes phosphorylation site proteins proteins domain identified by eMATRIX, accession number BL00370D, p-value= 4.857e-19, raw score of 22.48
  DOMAIN (1)..(126): PEP-utilizing enzymes domain identified by PFam, accession name PEP-utilizers, E-value=1.8e-55, PFam score of 194.5
MDRTSAPGESELYNIFCQALESANGRSIIVRTMDIGGDKPVDYLNIPAEANPFLGYRAVRIYEEYASLFTTQLRSILRASAHGSLKIMIPMISSMEEILWVKEKLAEAKQQLHSVWADVGDPFKVGPRSMQALSWPTICNGPNGKNPHYASNPLRHAITYRLNFIPALRLYGSPQGGTMNITPFPTLSPATIDAINVIGQWLAQDDFSGEVPYHADCVILAGNAVMPTIDAACKIARDQQIPLLISGGIGHSTTFLYSAIAQHPHYNTIRTTGRAEATILADIAHQFWHIPHEKIWIEDQSTNCGENARFSIALLNQAVKRVHTAIVVNDPTMQRRTMATFRRMTGDNPDAPRWLSYPGFVPSRRQNHLFFHFHQRLNILTLSQRDRRTGNRQRQLAFGNIFPEYLAICPGFPHLDRVFVPVGGGGLAAGVAVLIKQLMPQIKVIAVEAEDSAFEHLSLCLLT

SEQ ID NO: 59967 - protein, 160 aa, Homo sapiens
SEGKTANLFNKAITCSGAGECTRPWASDIKAQCAGGISRFATGNGFKRLCDTLRYLQAIENGLKNWRLIHIATVRRCPFPTLSPATIDAINVIGQWLAQDDFSGEVPYQADCVILAGNAVMPTIDAACKIARDQQILAEGDFGLRCEIRDWCANFVSDIR

SEQ ID NO: 59968 - protein, 171 aa, Homo sapiens
  misc_feature (1)...(171): Xaa = X or * as defined in Table 2
RCQTRQNAEYRVNAVLVHHFHAITHIRQQSQITRYIKLLRHRRHTQRRFTACRLRVDAPFPGNHQCCALHCLRKIDRIQHNFNARFNIRIEKYRRRNTHTARSAADPPSGRHXFQFAVVKHGRNFAAPVQVLRPSPALPLFAGQTPPPRRVPLPAGYQRHMLLQYDQATVN

SEQ ID NO: 59969 - protein, 162 aa, Homo sapiens
  misc_feature (1)...(162): Xaa = X or * as defined in Table 2
YRTPTLQLDQGRADARRGVWHVPFSHESVWENIVMTRQAQGANFTXTLFCFGIGFAVIAXNCAIDPDISIRFFSKEETATGDRPDQIAAHLWRFPTPGGRFVHHRGAYAAIIFRPXYLNGRSMAEQSMILVTGELLVELNLEPSQVGNEFAEKYYGPASQVV

SEQ ID NO: 59970 - protein, 139 aa, Homo sapiens
GAIISAAPAAAPVCKNAFTDICLMLSGSNVSSRNCCSICASRSLSFPVRRIICFSCRSFSCISQAPKITATRPLSSSERWTPYSLSNPASAARVVRTRRGYSLANSSGRVLSIPMANKLRFNAETGYPARRYNALSTNF

SEQ ID NO: 59971 - protein, 729 aa, Homo sapiens
  DOMAIN (593)..(608): NOL1/NOP2/sun family proteins domain identified by eMATRIX, accession number BL01153A, p-value=2.125e-18, raw score of 13.77
  DOMAIN (570)..(696): NOL1/NOP2/sun family domain identified by PFam, accession name Nol1_Nop2_Sun, E-value=2.8e-70, PFam score of 245.0
LTVRVIVAVAYCLPAARCLRYQPARFIIFPAALQPVRGHHRRQLVPVVIVKFRLPPVRCGDVRDIGGHHIQTDSVLVPPRRLPVSLLPGIPLRVTPFPTLSPATIDAINVIGQWLAQDDFSGEVPYQADCVILAGNAVMPTIDAACKIARDQQILISGGIGHSTTFLYSAIAQHPHYNTIRTTGRAEATILADIAHQFWHIPHEKIWIEDQSTNCGENARFSIALLNQAVERVHTAIVVQDPTMQRRTMATFRRMTGDNPDAPRWLSYPGFVPQLGNNADSVIFINQLQGLWPVERYLSLLTGELPRLRDDSDGYGPRGRDFIVHVDFPAEVIHAWQTLKHDAVLIEAMERVPSTDSSMRMAQHTEQGGIVILTTHQPLNVAETFRHSAEIANPLWFFLIVITLFPLSIGPEPQLLARIAPGIIWVAALLSSLLALERLFRDDLQDGSLEQLMLLPLPLPAVVLAKVMAHWMVTGLPLLILSPLVAMLLGMDVYGWQVMALTLLLGTPTLGFLGAPGVALTVGLKRGGMLLRVPARDSSTCRTYGREGRNFTHSNETTRSSLRDGLAVDYFTVQDASAQGCMTWLAPQNGEHILDLCAAPGGKTTHILEVAPEAQVVAVDIDEQRLSRVYDNLKRLGMKATVKQGDGRYPSQWCGEQQFDRILLDAPCSATGVIRRHPDIKWLRRDRDIPELAQLQWFRFLSEIRKTLHELALNICLSSHLHHFLECVQ

SEQ ID NO: 59972 - protein, 68 aa, Homo sapiens
SSLIGLIDGPDFKHWSEWPGFTIRAFSICAGSLHGLLQLLGIVMGRWHHEPQNQPCQVSRDLRLQVSH

SEQ ID NO: 59973 - protein, 185 aa, Homo sapiens
  DOMAIN (46)..(62): Fimbrial proteins domain identified by eMATRIX, accession number PF00419A, p-value=1.000e-11, raw score of 10.90
  DOMAIN (46)..(182): Fimbrial proteins domain identified by PFam, accession name Fimbrial, E-value=9e-39, PFam score of 142.2
SNRLYTDVESINEIEGIYMKLRFISSALAAALFAATGSYAAVVDGGTIHFEGELVNAACSVNTDSADQVVTLGQYRTDIFNAVGNTSALIPFTIQLNDCDPVVAANAAVAFSGQADAINDNLLAIASSTNTTTATGVGIEILDNTSAILKPDGNSFSTNQNLIPGTNVLYFSARYKGTGTSGMML

SEQ ID NO: 59974 - protein, 190 aa, Homo sapiens; identical to SEQ ID NO: 59168

SEQ ID NO: 59975 - protein, 339 aa, Homo sapiens
STARFLHSSRRRCDATKNDEDKKMSNAITMGIFWHLIGAASAACFYAPFKKVKKWSWETMWSVGGIVSWIIHPWAISALLLPNFWAYYSSFSLSTRLPVFLFGAMWGIGNINYGLTMRYLGMSMGIGIAIGITLIVGTLMTPIINGNFDVLISTEGGRMTLLGVLVALIGVGIVTRAGQLKERKMGIKAEEFNLKKGLVLAVMCGIFSAGMSFAMNAAKPMHEAAAALGVDPLGSCPPQKPDFSLAKSLIIHNVLLSTLGGLMWYLQFFFYAWGHARIPAQYDYISWMLHMSFYVLCGGIVGLVLKEWNNAGRRPVTVLSLGCVVIIVAANIVGIGMAN

SEQ ID NO: 59976 - protein, 64 aa, Homo sapiens
RVTERRCRCRYIRAIRRFPGHHLRSIRRQLCTEEILRQGREMIQWSSPNRKMVTGTSVAASPLS

SEQ ID NO: 59977 - protein, 295 aa, Homo sapiens
  DOMAIN (65)..(111): kw TRANSCRIPTASE REVERSE II ORF2 domain identified by eMATRIX, accession number DM01354O, p-value=1.000e-40, raw score of 8.73
  DOMAIN (98)..(284): Reverse transcriptase domain identified by PFam, accession name rvt, E-value=6.3e-08, PFam score of 39.8
MEMKVEIQTTIREYYKHLYTNKLENLQEMDKFLDIYTLRRINQEEVVSLNRAITGSEIEAIINSLTTKKSPGPDGFTAEFYQRYKEELVPFLLKLFQSIEKEGILPNSFYEASIILISKPGRDTTKKENFRPISLMNIDAKILNKILANQIQQHIKKLIHHDQVGFIPGMQGWFNIRKLINVIQHINRAKDKNHMIISIDAGKAFDKIQQPFMLKTLNKLDTKSELLDINNLYQAASDEIRAIVAFLLSGNATEPDWVDHDVRAYIAAMEMKVDLRLTGILVRFSDSGIGADYQT

SEQ ID NO: 59978 - protein, 239 aa, Homo sapiens
LESAIDHSLAVKRHGLAELFHPWVRHHLLISSVADLGGVVSSLGKGIAAASLASILEARGLNVTIMKLDPYINVDPGTMSPIQHGEVFVTEDGAETDLDLGHYERFIRTKMSRRNNFTTGRIYSDVLRKERRGDYLGATVQVIPHITNAIKERVLEGGEAIRQMAVEIGREHTLFMHLTLVPYMAASDTKSELLDINNLYQAASDEIRAIVAFLLSGNATEPDWVDHDVRAYIAAMEMK

SEQ ID NO: 59979 - protein, 65 aa, Homo sapiens
NIQGSPAQTMATLTFRLPPAVRLHQQRGGRPGRSSADHWHSGVPTRILPPAHRLLCIQRLPWLLL

SEQ ID NO: 59980 - protein, 306 aa, Homo sapiens
  DOMAIN (157)..(173): RING HYDROXYLATING DIOXYGENASE ALPHA-SUBUNIT SIGNATURE domain identified by eMATRIX, accession number PR00090B, p-value=3.429e- 09, raw score of 10.50
LLRASQKNTHRKQCWRSLAAKCRTRTSNIEANMNAYLTYDRIEERRWVEQQLTDEKEKWIDDRAKELIAMFPKYALQMSSLFLPKEAQMALVGEKAEEAYNDYVTRICYDRAEEENAQFRREGLDKPPIHIYKDFDTEEQRGDIVGAYVTVKTDDGDYLTHTMGIDAIYSIRDRSEAWKKYKSDNSKKCPWVTDEEQMILKTVVKQAAKYWPRRERLDAAIDHVNTEGEEGINFSAERQPERDVTPAGDEIIKEINDVLIAMDKTWEENLLPVCSQIFRRDIRDSSELTQAEAVKALGFLKKKAAA

SEQ ID NO: 59981 - protein, 246 aa, Homo sapiens
  misc_feature (1)...(246): Xaa = X or * as defined in Table 2
MQPWALPTVGELWVCGRPGAALRAGTEPSSRALGVSETALPAEIKLRVIRVGHSSPLAQLASFQKPVLFVLRLNSRRFLFLSLARSEDGILFAKSKHSSPLSLTPLRCIVLMRMYEQLMSGDLCQRVMMPSRNNPGYWNPQXXSEIFKGSPAQTMATLTCSFKKPPPKIPYKAIALATVLFLIGAFLIIIRLPSCCQGYIKQRGGRPGPFQLLIIGHSWCSYPGFYPPAHRFTMHPKGLPWVNPNE

SEQ ID NO: 59982 - protein, 62 aa, Homo sapiens
  misc_feature (1)...(62): Xaa = X or * as defined in Table 2
DCRLRAGDPRRSHCAVSPTGGSRALSGYRYXSVDQPRNDGVDQXATLRASAHLQTAVVEFSA

SEQ ID NO: 59983 - protein, 97 aa, Homo sapiens
  misc_feature (1)...(97): Xaa = X or * as defined in Table 2
RSHPQCGYLQNHTSSASFSAPARKGXNRHYAFARNDRLVPAPCSHHHQXPAFPAPVHLHXPVDLSTAIDAPAVNGDGKARPSKRRYQRLSVPEVVQY

SEQ ID NO: 59984 - protein, 1393 aa, Homo sapiens
  DOMAIN (359)..(404): Amino acid permeases proteins domain identified by eMATRIX, accession number BL00218D, p-value=9.280e-35, raw score of 21.49
  DOMAIN (158)..(599): Amino acid permease domain identified by PFam, accession name aa_permeases, E-value=6.7e-81, PFam score of 282.2
MGFHLSVATGTGFIALAGVAAEFGVVMLMYLRHAIEAVPSLNNPQTFSEQKLDEALYHGAVLRVRPKAMTVAVIIAGLLPILWGTGAGSEVMSRIAAPMIGGMITAPLLSLFIIPAAYKLMWLHRHRVPLNKKDTQGKGVKNASTVSEDTASNQEPTLHRGLHNRHIQLIALGGAIGTGLFLGIGPAIQMAGPAVLLGYGVAGIIAFLIMRQLGEMVVEEPVSGSFAHFAYKYWGPFAGFLSGWNYWVMFVLVGMAELTAAGIYMQYWFPDVPTWIWAAAFFIIINAVNLVNVRLYGETEFWFALIKVLAIIGMIGFGLWLLFSGHGGEKASIDNLWRYGGFFATGWNGLILSLAVIMFSFGGLELIGITAAEARDPENSIPKAVNQVVYRILLFYIGSLVVLLALYPNIPIDSINTMINTAVMVRMETGSKIGIPNDIGVTIANHEASCSPDKLTSFIIHERGQMGIIAQNKISSLGMLFGAIAWMMGIIHFSFGPFSAPPPTFESIVADKTAEIKRGLLAGIKGEKITTVEKKEDVDVDKILNQSGIALAIAALLCAFIGGMRKENRWGIRGALVFGGGTLAFHTLLFGIGIHFADIPYLFLPDRRFTGLSSLNNARRVIISGHYRQNFCFFSSTFTPCVGRCHSRVQLANSHLVDVDETPPSSAAVHLYATDADSIGNCGTDREFCPCNPIRRHAFCCERLQNGYHRSGYAFHLGHYGDRKVITNFYSLIAKNHLSHWLETLPAQIANWQREQQHGLFKQWSNAVEFLPEIKPYRLDLLHSVTAESEEPLSAGQIKRIETLMRNLMPWRKGPFSLYGVNIDTEWRSDWKWDRVLPHLSDLTGRTILDVGCGSGYHMWRMIGAGAHLAVGIDPTQLFLCQFEAVRKLLGNDQRAHLLPIEQLPALKAFDTVFSMGVLYHRRSPLEHLWQLKDQLVNEGELVLETLVIDGDENTVLVPGDRYAQMRNVYFIPSALALKNWLKKCGFVDIRIADVSVTTTEEQRRTEWMVTESLADFLDPHDPAIFQIWPCTFMHAYHAFFDPVSHHRACQNLTTFVPDTHQIAIRNTKACSIFVSFALRTTHSCAISHSSLEDPPAILFKIADRMEQNLELLATLETWDNGKPIRETSAADVPLAIDHFRYFASCIRAQEGGISEVDSETVAYHFHEPLGVVGQIIPWNFPLLMASWKMAPALAAGNCVVLKPARLTPLSVLLLMEIVGDLLPPGVVNVVNGAGGVIGEYLATSKRIAKVAFTGSTEVGQQIMQYATQNIIPVTLELGGKSPNIFFADVMDEEDAFFDKALEGFALFAFNQGEVCTCPSRALVQESIYERFMERAIRRVESIRSGNPLDSVTQMGAQVSHGQLETILNYIDIGKKEGADVLTGGRRNCWKVN

SEQ ID NO: 59985 - protein, 396 aa, Homo sapiens; identical to SEQ ID NO: 56090

SEQ ID NO: 59986 - protein, 112 aa, Homo sapiens
LTGSKKAWYACMKVHGQIWKMAGSCGSRKSASDSVTIHSVRRCSSVVVTLTSAMRICLGGRSLVHNGSIPNNRVPDSPSCRDFIPISRNGMSAIRVRSAKYIENASPMGFGT

SEQ ID NO: 59987 - protein, 103 aa, Homo sapiens
  misc_feature (1)...(103): Xaa = X or * as defined in Table 2
FALFANRVSLAANVSGRGSPCWWRRIAVVCCSTNRRSALDIAHQVDVLSLVHRLSQERGLTVIAVLHDINMAARYCDYLAPCAAVKXLLRERLRKLCAAKPSK

SEQ ID NO: 59988 - protein, 1059 aa, Homo sapiens
  DOMAIN (152)..(174): AAA-protein family proteins domain identified by eMATRIX, accession number BL00674B, p-value=5.655e-13, raw score of 4.46
  DOMAIN (584)..(846): ABC transporter domain identified by PFam, accession name ABC_tran, E-value=0.00021, PFam score of -11.9
ISFSGFSASRNSICATIRLAMWSSTWPSRKNDAFLDQLYVLGTFALLVFLFVQIILFLIRTVRTDTHVVEDTGRKGSRKANSRERFPDAFPEFHGFADFRVLRQSMIQIWLVSMVQHVHDVCPRIRALQHDLSDVIGQEQGKRGLEITAAGGHNLLLIGPPGTGKTMLASRINGLLPDLSNEEALHIAPGKKQWSWGHSEFGQAWDKSLTDNNGPYIELMTGIFADNQPDFTWLDAYEEKRFEQYFLPYHSLGMVQNASRDAVIKLQRSKRGIEWGLYAISPLNGYRLAIREIGKCNALLDDAVALMPATAIQGVLHGINPERLTIELSDADGNIVLSYQEHQPQALPLPDVAKAPLAAQDITSTDEAWFIGQHLEQYHHASRSPFDYYLRGVALDPLDIAGDDQQDPIADSARAILDGHIVLSRRLAEAGHYPAIDIEASISRAMTALISEQHYARIQFHRVCPAQNRKQIGISNCKSLPADPVLILQCLVHILQLLLQLRANCRFVLFRCIRAKQRCETFMQLGGDVIQPFDGFIAGNTVYRCQQLAVGDAVGKILHNRYAFRQQSTVIQQQCRHLALRVNGKVLAELQASQLDVTCGTPTRTASLAAASVKHLWQLKDQLVNEGELVLETLVIDGDENTVLVPGDRYAQMRNVYFIPSALALKNWLKKCGFVDIRIADVSVTTTEEQRRTEWMVTESLADFLDPHDPGKTVEGYPAPKRALADQTPLTSVHCPYIFRYTPTLSYRHRHLPAASWGYPPLTRSHCRFYTSHFPDLAMHLMHAYRDSRCLLLDEPTSALDIAHQVDVLSLVHRLSQERGLTVIAVLHDINMAARYCDYLVALRGGEMIAQGTPAEIMRGETLEMIYGIPMGILPHPAGAAPTKTHQSLFVYEHEDDSDDDDPHHGKPSAHSSLWHAIWLIIHLIAVIAVTKMNASSLETLLDSMNAPVAFTGFLVALLILSPEGLGALKAVLNNQVQRAMNLFFGSVLATISLTVPVVTLIAFMTGNELQFALGAPEMVVMVASLVLCHISFSTGRTNVLNGAAHLALFAAYLMTIFA

SEQ ID NO: 59989 - protein, 48 aa, Homo sapiens
ALNLPTRQDAILPTPIPQRTSPAPARQSMHKRQGRRSSRRRLFWNHLL

SEQ ID NO: 59990 - protein, 307 aa, Homo sapiens
MSSNTFTLGTKSVNRLGYGAMQLAGPGVFGPPRDRHVAITVLREALALGVNHIDTSDFYGPHVTNQIIREALYPYSDDLTIVTKIGARRGEDASWLPAFSPAELQKAVHDNLRNLGLDVLDVVNLRVMMGDGHGPAEGSIEASLTVLAEMQQQGLVKHIGLSNVTPTQVAEARKIAEIVFVQNDHNFALRDALHALKLRVRQGEGKDLNNESTPMAFENIKQVIDDMATDATMFDVNKKCLLLFNVLADDGYWRTSAATGKIARTPQNAFVVIPECNIWSISSQSPTRYAFEAVYQTGYRQFGRIVN

SEQ ID NO: 59991 - protein, 86 aa, Homo sapiens
  misc_feature (1)...(86): Xaa = X or * as defined in Table 2
IRDKNRVFLRESWRRLFTTANDQPHRPARRIISIAGIKWRYSDFLINYCAGRAVFXRETGSVVERWHHHAGWKTPFRKRAGRTAGH

SEQ ID NO: 59992 - protein, 72 aa, Homo sapiens
  misc_feature (1)...(72): Xaa = X or * as defined in Table 2
PIKITSALASASRYVRATLSCSRNSTLRWKKXRKMALTKPSTTNGSRSNSXXMNFFLXQAPPGXPSALPFVH

SEQ ID NO: 59993 - protein, 37 aa, Homo sapiens
ASDQERQSVALWHEGPHWCRCQEWPDPQPGHHRGQRA

SEQ ID NO: 59994 - protein, 489 aa, Homo sapiens
MLGKHSHGPPDEHEHWTKDNAKSSREARHPQTEQNENSPRAKTSRRGTRDKAHMRTTTAGSQKVRLYYEGWERVKYNEDVGELHRTDANGNRIKLRFATMLARKPVLRWVDPSFDQSKYDSIVWNPITYYPVPKPSTQVGQKVLDKILNYTNTEMKEAIAQRKPLVTTAGPRSLIFRGAITGVDTSKEGLQFYEVVPVALVVAGTQMATGHRTMDTRLYFEGELIDAATNKPVIKVVRQGEGKDLNNESTPMAFENIKQVIDDMATDATMFDAGGTSNQFNDHTVTFAVLSGSATSFNNQNTAKTDVNGLATFDLKSSKQEDNTVEVTLENGVKQTLIVSFVGDSSTAQVDQKLAQAATHTSPAAMGKIKLCIARRSPGSMLTTPNILMPQMRNPVASSNKPPTALKSAMILPRPTRNPGGRRESAEAARPRRRAAKPVTVVGIAIACSFAQTHTINNRRVVQCVGDNGVFRTQEAFQTRPPLASKQEE

SEQ ID NO: 59995 - protein, 920 aa, Homo sapiens
  DOMAIN (53)..(81): Glycosyl hydrolases family 31 proteins domain identified by eMATRIX, accession number BL00129C, p-value=1.329e-10, raw score of 15.12
  DOMAIN (653)..(752): Glycine radical domain identified by PFam, accession name Gly_radical, E-value=2.8e-37, PFam score of 137.3
MGVDCFKTDFGERIPTDVQWFDGSDPQKMHNHYAYIYNELVWNVLKDTVGEEEAVLFARSASVGAQKFPVHWGGDCYANYESMAESLRGGLSIGLSGFGFWSHDIGGFENTAPAHVYKRCYAKTNHLFKRGIFCQFQCHRADHAVTSANVLENAAIILDVFAEHTHDFCELVIVWRGNGLHVLNDRPYRITRGDLFYIHADDKHSYASVNDLVLQNIIYCPERLKLNLDWQGAIPGFNASAGQPHWRLGSMGMAQARQVIGQLEHESSQHVPFANEMAELLFGQLVMLLNRHRYTSDSLPPTSSETLLDKLITRLAASLKSPFALDKFCDEASCSERVLRQQFRQQTGMTINQYLRQLRCALKNGSLLDFRETLYIMALAMKVISQVEAQRKILEEAVSTALELASGKSDGAEVAVSKTTGISVSTRYGEVENVEFNSDGALGITVYHQNRKGSASSTDLSPQAIARTVQAALDIAVIPSQNPVAAWQTKSCWPLTHQISTWFTLPKFSRMKPLNWLDRARTCPHCRRTNALPVPGACGVRLNADDDVSEIFKNGRASISLGYIGIHETINALFGGEHVYDNEQLRAKGIAIVERLRQAVDQWKEETGYGFSLYSTPSENLCDRFCRLDTAEFGVVPGVTDKGYYTNSFHLDVEKKVNPYDKIDFEAPYPPLANGGFICYGEYPNIQHNLKALEDVWDYSYQHVPYYGTNTPIDECYECGFTGEFECTSKGFTCPKCGTMTPSVCRLVSINSPAIRRLQQKTQVFPLERNAAVRTRLTHSMEVQQVGRYIAKEILSRLKELKLLEAYGLDELTGPFESIVEMSCLMHDIGNPPFGHFGEAAINDWFRQRLHPEDAESQPLTDDRCSVAALRLRDGEEPLNELRRKIRQDLCHFEGNAQGIRLVHTLMRMNLTWAQVGIEQ

SEQ ID NO: 59996 - protein, 58 aa, Homo sapiens
  misc_feature (1)...(58): Xaa = X or * as defined in Table 2
RNRQCYRARHLRWCLQYQRACSGRXVPNLRLPEVQSTDRLLSQRRRVSPDRQWWLACH

SEQ ID NO: 59997 - protein, 501 aa, Homo sapiens
  DOMAIN (204)..(220): MAJOR SIGMA-70 FACTOR SIGNATURE domain identified by eMATRIX, accession number PR00046D, p-value=3.077e-10, raw score of 9.85
  DOMAIN (16)..(232): Sigma-70 factor domain identified by PFam, accession name sigma70, E-value=1.5e-41, PFam score of 151.5
AAFRWGNGADLTDDELIDLFKLIENSSSEVKPKAKAKPKTAGIKRPVVKMEKTAEKGGRPASNEIHEYVLRNWRIVKVATTKAQRKLFFNLRKTKQRLGWFNQDEVEMVARELGVTSKDVREMESRMAAQDMTFDLSSDDDSDSQPMAPVLYLQDKSSNFADGIEDDNWEEQAANRLTDAMQGLDERSQDIIRARWLDEDNKSTLQELADRYGVSAERVRQLEKNAMKKLRAAIEAEEPPVHRTAGQTPFLRHLTSSTGGTAMPTGPELVPVVRTPCAGAPRRIPPAPGRTPPGNSQRLSQSICCVVSTALELASGKSDGAEVAVSKTTGISVSTRYGEVENVEFNSDGALGITVYHQNRKGSASSTDLSPQAIARTVQAALDIARYTSPDPCAGVADKELLAFDAPDLDLFHPAEVSPDEAIELAARAEQAALQADKRITNTEGGSFNSHYGVKVFGNSHGMLQSASDGRRTSTRLNVAAAAFRFAEPLQKSLHACSLIP

SEQ ID NO: 59998 - protein, 488 aa, Homo sapiens; identical to SEQ ID NO: 44184
  DOMAIN (25)..(55): Fructose-bisphosphate aldolase class-II proteins domain identified by eMATRIX, accession number BL00602A, p-value=7.968e- 23, raw score of 21.84
  DOMAIN (410)..(481): Transcriptional regulatory protein, C t domain identified by PFam, accession name trans_reg_C, E-value=1.5e-38, PFam score of 133.1

SEQ ID NO: 59999 - protein, 200 aa, Homo sapiens
  DOMAIN (114)..(129): Beta-ketoacyl synthase domain identified by eMATRIX, accession number PF00109, p-value=7.273e-13, raw score of 13.08
  DOMAIN (1)..(200): Beta-ketoacyl synthase domain identified by PFam, accession name ketoacyl-synt, E-value=3.2e-08, PFam score of -21.9
LGKQDIVFAGGGEELCWEMACEFDAMGALSTKYNDTPEKASRTYDAHRDGFVIAGGGGMVVVEELEHALARGAHIYAEIVGYGATSDGADMVAPSGEGAVRCMKMAMHGVDTPIDYLNSHGTSTPVGDVKELAAIREVFGDKSPAISATKAMTGHSLGAAGVQEAIYSLLMLEHGFIAPSINIEELDEQAAGLNIVTETT

SEQ ID NO: 60000 - protein, 217 aa, Homo sapiens
  DOMAIN (93)..(108): Beta-ketoacyl synthase domain identified by eMATRIX, accession number PF00109, p-value=7.273e-13, raw score of 13.08
  DOMAIN (1)..(207): Beta-ketoacyl synthase domain identified by PFam, accession name ketoacyl-synt, E-value=4.2e-08, PFam score of -24.8
NTFKECKFSQAPFRFGNDPFLASVVSRDGFVIAGGGGMVVVEELEHALARGAHIYAEIVGYGATSDGADMVAPSGEGAVRCMKMAMHGVDTPIDYLNSHGTSTPVGDVKELAAIREVFGDKSPAISATKAMTGHSLGAAGVQEAIYSLLMLEHGFIAPSINIEELDEQAAGLNIVTETTDRELTTVMSNSFGFGGTNATLVMRKLMIISASTTSILR

SEQ ID NO: 60001 - protein, 824 aa, Homo sapiens; identical to SEQ ID NO: 54685
  DOMAIN (18)..(40): AAA-protein family proteins domain identified by eMATRIX, accession number BL00674B, p-value=3.554e-09, raw score of 4.46
  DOMAIN (416)..(468): SecA protein, amino terminal region domain identified by PFam, accession name SecA_protein, E-value=5.6e-23, PFam score of 71.0

SEQ ID NO: 60002 - protein, 155 aa, Homo sapiens
  misc_feature (1)...(155): Xaa = X or * as defined in Table 2
LFNREVCCLGQGQSXQMALXLLGIESYITXLXSGGDNASIGVIPDPAAIARXRPWRSACGXXPKCPLADVFAGHSGRKRPPSMAFTATLISPGTGRRAINSVLAQFKAGESNIWLSALPTPLTPTIRITNGALPSTFSGSSTFARISPISSFSRP

SEQ ID NO: 60003 - protein, 66 aa, Homo sapiens
QAPSSSWCGSHASLGCQIAVTRSSAGVTICALTSKKSFATKFSISSSRRTTSPSTGVCTRPTESTP

SEQ ID NO: 60004 - protein, 346 aa, Homo sapiens
  DOMAIN (218)..(228): Response regulator receiver domain proteins domain identified by eMATRIX, accession number PF00072B, p-value=1.000e-11, raw score of 11.11
  DOMAIN (270)..(337): Transcriptional regulatory protein, C te domain identified by PFam, accession name trans_reg_C, E-value=4.9e-29, PFam score of 101.4
VSEMVDTTQTTTEKKLTQSDIRGVFLRSNLFQGSWNFERMQALGFCFSMVPAIRRLYPENNEARKQAIRRHLEFFNTQPFVAAPILGVTLALEEQRANGAEIDDGAINGIKVGLMGPLAGVGDPIFWGTVRPVFAALGAGIAMSGSLLSPLLFFILFNLVRLATRYYGVRLVVLDLGLPDEDGLHFLARIRQKKYTLPVLILTARDTLTDKIAGLDVGADDYLVKPFALEELHARIRALLRRHNNQGESELIVGNLTLNMGRRQVWMGGEELILTPKEYALLSRLMLKAGSPVHREILYNDIYNWDNEPSTNTLEVHIHNLRDKVGKARIRTVRGFGYMLVANEEN

SEQ ID NO: 60005 - protein, 381 aa, Homo sapiens
  DOMAIN (166)..(204): Beta-ketoacyl synthases proteins domain identified by eMATRIX, accession number BL00606B, p-value=9.217e-23, raw score of 28.75
  DOMAIN (24)..(380): Beta-ketoacyl synthase domain identified by PFam, accession name ketoacyl-synt, E-value=2.4e-39, PFam score of 144.2
IIHFGADASATQVGQLPTYLADDAVAGHARTRINAENNSHHASPFCFSQELKDSGMRSHVWGNVKLDTTGLIDRKVVRFMSDASIYAFLSMEQAIADAGLSPEAYQNNPRVGLIAGSGGGSPRFQVFGADAMRGPRGLKAVGPYVVTKAMASGVSACLATPFKIHGVNYSISSACATSAHCIGNAVEQIQLGKQDIVFAGGGEELCWEMACEFDAMGALSTKYNDTPEKASRTYDAHRDGFVIAGGGGMVVVEELEHALARGAHIYAEIVGYGATSDGADMVAPSGEGAVRCMKMAMHGVDTPIDYLNSHGTSTPVGDVKELAAIREVFGDKSPAISATKPCRTLGPGSRYHMFPWGLTATHVQRQIANNQLTFALIIMAS

SEQ ID NO: 60006 - protein, 383 aa, Homo sapiens
  misc_feature (1)...(383): Xaa = X or * as defined in Table 2
MKIGTQNQAFFPENILEKFRYIKEMGFDGFEIDGKLLVNNIEEVKAAIKETGLPVTTACGGYDGWIGDFIEERRLNGLKQIERILEALAEVGGKGIVVPAAWGMFTFRLPPMTSPRSLDGDRKMVSDSLRVLEQVAARTGTVVYLEPLNRYQDHMINTLADARRYIVENDLKHVQIIGDFYHMNIEEDNLAQALHDNRDLLGHVHIADNHRYQPGSGTLDFHALFEQLRADNYQGYVVYEGRIRAEDPAQAYRDSLAWLRAGQVADKVHASYYCTRNDLELVAVCDSRLSQAQALAEKYGNASVWDDPQAMLLAVKPXFVGLVGAGQVADKVHASYYCTRNDLELVAVCDSRLSQAQALAEKYGNASVWDDPQAMLLAVKPDV

SEQ ID NO: 60007 - protein, 241 aa, Homo sapiens
  DOMAIN (7)..(52): PROTEIN OXIDOREDUCTASE NAD INTERGENIC RE domain identified by eMATRIX, accession number PD01311A, p-value=7.658e-11, raw score of 30.23
  DOMAIN (1)..(187): Oxidoreductase family domain identified by PFam, accession name GFO_IDH_MocA, E-value=1.1e-23, PFam score of 92.1
AQALAEKYGNASVWDDPQAMLLAVKPDVRGCHVMCEKPPAMTPEQAREMCDTARKLGKVLAYDFHHRFALDTQQLREQVTNGVLGEIYVTTARALRRCGVPGWGVFTNKELQGGGPLIDIGIHMLDAAMYVLGFPAVKSVNAHSFQKIGTQKSCGQFGEWDPATYSVEDSLFGTIEFHNGGILWLETSFALNIREQSIMNVSFCGDKAGATLFPAHIYTDNNGEVMTLCNGNSGQASHLTQ

SEQ ID NO: 60008 - protein, 257 aa, Homo sapiens
ITQPNGAVKYRFFRRRMAAIEAEVTFTLKLECFTRNRIFQRLFSKALFESQRFRVNHRQEIIRSNWNQAFFPENILEKFRYIKEMGFDGFEIDGKLLVNNIEEVKAAIKETGLPVTTACGGYDGWIGDFIEERRLNGLKQIERILEALAEVGGKGIVVPAAWGMFTFRLPPMTSPRSLDGDRKMVSDSLRVLEQVAARTGTVVYLEPLNRYQDHMINTLADARRYIVENDLKHVQIIGDFSADGCAVPSLLCHAWRI

SEQ ID NO: 60009 - protein, 371 aa, Homo sapiens
  DOMAIN (76)..(121): PROTEIN OXIDOREDUCTASE NAD INTERGENIC RE domain identified by eMATRIX, accession number PD01311A, p-value=3.625e-35, raw score of 30.23
  DOMAIN (13)..(268): Oxidoreductase family domain identified by PFam, accession name GFO_IDH_MocA, E-value=4e-70, PFam score of 246.4
EVFVKSAMTSSPLRVAIIGAGQVADKVHASYYCTRNDLELVAVCDSRLSQAQALAEKYGNASVWDDPQAMLLAVKPDVVSVCSPNRFHYEHTLMALEAGCHVMCEKPPAMTPEQAREMCDTARKLGKVLAYDFHHRFALDTQQLREQVTNGVLGEIYVTTARALRRCGVPGWGVFTNKELQGGGPLIDIGIHMLDAAILAATPGAFQPLYPLYARTPLDAPALRRQAWRQLNLGRQHHGEWGQNGNSMRGATEGIHQEEEERPCWRGHGLLWLLGWQRSHWGAMLAELARNLPSKMLRKAIHVEVFHWMHSAAKSTERDASGSCWRLGGADHHVQQEPVAEEGVDTLGAMRVCSSLQKECTGTRKENCFFL

SEQ ID NO: 60010 - protein, 283 aa, Homo sapiens
  DOMAIN (168)..(206): Short-chain dehydrogenases/reductases family proteins domain identified by eMATRIX, accession number BL00061B, p-value=1.750e- 16, raw score of 25.79
  DOMAIN (246)..(276): Short chain dehydrogenase/reductase C-te domain identified by PFam, accession name adh_short_C2, E-value=1.1e-11, PFam score of 47.0
MYKWTPIMSTVMEIGYDNVESQRTGDKNNQCRITLAQQWQAGDSIWSRPAIRVFATYAKWDEKWGYDYTGNADNNANFGKAVPADFNGGSFCRGDSDEWTFGLQRLSNVGRIRRLRRIRHDQRSRYQSFQAGWLQPRISKDEIISPVVQFCWWIEHKEKHFIARGNGGNTINIASMLSFQGGIRVPSYTASKSGVMGVTRLMANEWAKHNINVNAIAPGYMATNNTQQLRADEQRSAEILDRIPAGRWGLPSDLMGPIVFLASSASDYVNGYTIAVDGGWLAR

SEQ ID NO: 60011 - protein, 74 aa, Homo sapiens
RQRHQVVDRRYSPDVQVDANHEHRDGNRLRQRRIPAHRRQEQSVQNYPRTTMAGWRQHLVTPGYSCLRNLRQVG

SEQ ID NO: 60012 - protein, 204 aa, Homo sapiens
  DOMAIN (32)..(47): FecCD transport family domain identified by eMATRIX, accession number PF01032B, p-value=7.600e-15, raw score of 9.12
  DOMAIN (2)..(95): FecCD transport family domain identified by PFam, accession name FecCD_family, E-value=0.016, PFam score of -166.8
LRMVVMAYDAPWRNVLVAATGWMVGVSVALAGAIGFIGLVIPHILRLCGLTDHRVLLPGCALAGASALLLADIVARLALAAAELPIGVVTATLGQNDTRHTTTRRTDAATQKRDSRKKIERTEEDEQDTRRRKKHRRTKRTSRRTHERTKSTKEQHTPHLGWVDSGLWCGSPPAFANGHCGNYCKETHGKIKESFPGILLDRHS

SEQ ID NO: 60013 - protein, 79 aa, Homo sapiens
AAHLTSRRSSMSEAAHAKKVPASVVHETAADGLVEGGHHHPAPDPLKSGDKPTPARDRGRQVTSWSISFCREKCLNIIA

SEQ ID NO: 60014 - protein, 603 aa, Homo sapiens
  DOMAIN (1)..(122): Inosine-uridine preferring nucleoside hy domain identified by PFam, accession name IU_nuc_hydro, E-value=3.6e-05, PFam score of -99.5
MAGLDVTHKAQIHVEDTERFRAIGNPVSTIVAELLDFFLEYHKDEKWGFVGAPLHDPCTIAWLLKPELFTSVERWVGVETQGKYTQGMTVVDYYYLTGNKPNATVMVDVDRQNLKEEISEFAVNLDALHSQEVKSSLMMSDKRCTRQTGPEAHWKSTFTHDDFAAFVIPPSTVEMLGLSHRHVGSLHAADERMALENARDAYTRRSEGCSIWVVKASEIVASQPEERGQARNFLSYAAELAGEGDEDTLAFTRDERQFSNLLLVEQPNGNFADTIARQYFIDAWHVALFTRLMESPIKEARYHLRFSRGWLERLGNGTDVSGQKMQQAINKLWRFTAELFDADEIDIALSEEAEVFAGINEATLNVPQEQAYRTGGKKGLHTEHLGPMLAEMQYLQRVLPVIELGATIMAKIAWTVSLTRPGNALVNNPGSAHLEGFCSLAGVAKAKGEIFSGCRKTRRCSAAVAGASQYCECAGMTALSMSVGATLDAIKAGLANLKAVPGRLFPIQLAENQLLLDDSYNANVGSMTAAVQVLAEMPGYRVLVVGDMAELGAESEACHVQVGEAAKAAGIDRVLSVGKQSHAISTPAALANILLIKCVNYAS

SEQ ID NO: 60015 - protein, 154 aa, Homo sapiens
RAVSHRQHFTGVDIHQHGATRFSLVKGHRIVQFAINQRLQAFINTQRQVVRSLAVSRRNIFNYATIAVFTHNALTRLPGKPFIETLLNALNPLTIDVSKANEVSSHFAGWIITARFFTQMNPRQFQFFDVVRHVRVHLTRQINKAPFRVGVNAG

SEQ ID NO: 60016 - protein, 239 aa, Homo sapiens
  DOMAIN (27)..(208): Mur ligase family domain identified by PFam, accession name Mur_ligase, E-value=0.00011, PFam score of -26.4
  misc_feature (1)...(239): Xaa = X or * as defined in Table 2
AVDTGLADHRDRTEHGGAFAAIVHRIVKHFITAWAICQQRNHAALVVIRRLEANHRRHRTGRGSVDRVSAARSLSSGTMPGNGVWRIGVFTQLSVAWHQXVDLLIVFQFVRDTTDDHDVGIFALAANDRAAFDNILDPTGSVDVLLPLPGRHNIANALAAAALSMSVGATLDAIKAGLANLKAVPGRLFPIQLAENQLLLDDSFLVNAAQQNILSVHILNQQTGKPAADVTVTLQEGDG

SEQ ID NO: 60017 - protein, 409 aa, Homo sapiens
  misc_feature (1)...(409): Xaa = X or * as defined in Table 2
TLKACCLVRSMCRAVPXRCGRQLVSSDNISNDPMNVIDWINMYALAVSEENAAGGRVVTAPTNGACGIIPAVLAYYDKFRRPVNERSIARYFLAAGAIGALYKMNASISGAEVGCQGEIGVACSMAAAGLTELLGGSPAQNMEGKIDRPEEYADIATKCVTNFREKNRDRCLVILSRNDEALNSQRTSEELHHYYEIVWDEEQTHKFKNISPHLQRIKAFKTLGGPHGNITVDMVISAQELLQEDMATFDGHIVEALMKMPEVNAMYPELKLHAIGWVKHKCIPGAKWPEIQAEMRIWKKRREGERKETGKYTSVVDLARARANQQYTENSTGKISPVIAAIHREYKQTWKTLDDELAYGRCFADRQNLMVCLRSMPNVFTGSCARMRCCLSENLLYRHRNGHIQAEWP

SEQ ID NO: 60018 - protein, 1065 aa, Homo sapiens
  DOMAIN (32)..(104): Glycosyl hydrolases family 31 domain identified by PFam, accession name Glyco_hydro_31, E-value=7.7e-18, PFam score of 62.4
MAWRRLSRRRVAGNDRTWPAPQRHWRYTTLFEMKRSKELPVRWCDFSAFTPMMRTHEGNRPGDNWQFDGDAETIAHFARMTTVFTTLKPYLKEAVALNAKSGLPQLVDIREEMPEQTAKRMLSLLGILKYKPSGNATDMGKEHRTLPANFAFNEFVARHLRHRRTVNQLQPGENHLGGGVAVASSFGTSIIATPIAVTPPINLPTIIGKIMAFMLAAAKPKWSPRAKAAETAKAQLMTLPRNSVILFASRLSSHAPAGLQGHINFTISTKILDSNEPCGGQKGFVPQKGRSDTLIKPVLVKDPMVSQGLRCLKNSATSTTNLYTQALLAYIFSLAGEMDIRNILLKQLDQQAIISGFILVTVIKSSNADDTSIYMFYQKVGDNSIDSWKNAGRVFKDSDKFDANDPILKDQTQEWSGCDPQLGCDFVVSEARAFASDHRQAEWSSKDDFMRLGKPILFFGVTAGNMDSMINRYTADRRLRHDDAYTPDNVAGKRPDRATLVYTQRCKEAWKDVPVILGGIEASLRRTAHYDYWSDTVRRSVLVDSKADMLMFGNGERPLVEVAHRLAMGEPISEIRDVRNTAIIVKEALPGWSGVDSTRLDTPGKIDPIPHPYGEDLPPVRSDEQAEALPEAYEPIEVNEFGEIDLLAMVEDEIILALPVVPVHDSEHCEVSEADMVFGELPEEAQKPNPFAVLASLKRVRSMAVQQNKPTRSKRGMRRSHDALTAVTSLSVDKTSGEKHLRHHITADGYYRGRKVVWDDVLMSEQGKQLASRCLISWDGCVWHDLLMKDAALLRLEANANVGSSSTGEYYGMFQFWYGHYPYQVAEYDQCPVSGQWNFPQPFIDQMPQGHSSQRSIIWRPSFSEGTDLFSFFRPAIQPAIQPANQLSIHNLWTQFRHSTKIPVEWVNGEWLNGRMPGDHHEWQCNYQDPMVSQGLRCLKNSATSTTNLYTQALLAYIFSLAGEMDIRNILLKQLDQQAIISDLPHMKAAKAYGWHPLKQQPQLQLDPFEPQLELEQLGCRKQCLEAVQQLPGAEVELQLQAAPGSLRRSGRWMRVSYCLGQTKS

SEQ ID NO: 60019 - protein, 206 aa, Homo sapiens
  misc_feature (1)...(206): Xaa = X or * as defined in Table 2
LLAGTALVGGVQPADAITVDAMIPNFNWAFLGVTTWIFMAAGGAESVACTLTTSKAVRNRSFKXSSSPGILSGYVSRSSGSPISSLISPASLCAGHMRFFCSSSKPTCSNPRTFAAALSSAWSSPSPNEGFSSNPAFLGTSLMMFHLELRRCIAPIVTTDLLPLTSGDVGLVLLCVGLDGSLWSDCRMTESVSTTNTPPIITSRNS

SEQ ID NO: 60020 - protein, 277 aa, Homo sapiens
  DOMAIN (30)..(40): Aminotransferases class-II pyridoxal-phosphate attachment sit domain identified by eMATRIX, accession number BL00599C, p-value= 6.824e-11, raw score of 9.13
  DOMAIN (132)..(276): Histidine kinase domain identified by PFam, accession name signal, E-value=5e-05, PFam score of -1.3
  misc_feature (1)...(277): Xaa = X or * as defined in Table 2
MEDAILYSSCFDANGGLFETLLGAEDAIISDALNHASIIDGVRLCKAKRYRYANKDMQELEHHLIVFIVLLAVHKASAVKSRILPRKISTFASTRRPCFIELEQLVLSLNHMIERIEDVFTRQSNFSADIAHEIRTPITNLITQTEIALSQSRSQKELEDVLYSNLEELTRMAKMVSDMLFLAQADNNQLIPEKKMLNLADEVGKVFDFFEALAEDRGVELRFVGDKCQVAGDPLMLRRALSNLLSNALRYTPTGETIVVRCKTGDHLVQVIVENPX

SEQ ID NO: 60021 - protein, 678 aa, Homo sapiens
  DOMAIN (407)..(418): 0 PROKARYOTIC DNA TOPOISOMERASE I domain identified by eMATRIX, accession number DM00471B, p-value=5.886e-12, raw score of 8.45
  DOMAIN (435)..(472): Topoisomerase DNA binding C4 zinc fing domain identified by PFam, accession name zf-C4_Topoisom, E-value=5.7e-14, PFam score of 59.8
  misc_feature (1)...(678): Xaa = X or * as defined in Table 2
CTSSPDPPSGLPPGFAKLTSLIVTLVEVGVSPEPDEGWLYLAVVIDLWSRAVIGWSMSPRMTAQLACDALQMALWRRKKPRNVIVHTDRGGQFGDRWKGWLTRSIFRWISFQPALAPTRKAALCYLAREVNPDMADYIKKLKLPGIHVREESRRYYPSGEVTAHLIGFTNVDSQGIEGVEKSFDKWLTGQPGERIVRKDRYGRVIEDISSTDSQAAHNLALSIDERLQALVYRELNNAVAFNKAESGSAVLVDVNTGEVLAMANSPSYNPNNLSGTPKEAMRNRTITDVFEPGSTVKPMVVMTALQRGVVRENSVLNTIPYRINGHEIKDVARITTEEDFNHASAARFVCAAAERRCKTTINLVPENEVLNVLEGEDAETNALRAKRRCPKCGTAMDSYLIDPKRKLHVCGNNPTCDGYEIEEGEFRIKGYDGPIVECEKCGSEMHLKMGRFGKYMACTNEECKNTRKILRNGEVAPPKEDPVPLPELPCEKSDAYFVLRDGAAVAARFNDDRHRRGLAVLYADQADLYGVADSVSAGDSLSALYKHERRLVVPLLVSSSLLFLYRHGIRLPCGPSGGIWAPWQIRRGRQAVNCLAPMHHPGKNRAWKTYCSQXAIVPQLPVCGIXPRSDSYHDYQRDPRCQPLRALWRRSDSPIGGYSSAIGIXTERHCRSGNPLSG

SEQ ID NO: 60022 - protein, 279 aa, Homo sapiens
  DOMAIN (38)..(228): Mur ligase family domain identified by PFam, accession name Mur_ligase, E-value=9.4e-06, PFam score of -12.2
DVHRNRYQSGIKRLFEAHSGEENFNTHVHDRTVNNHREPRRYQIHLVKGHRIVQFAINQRLRRSSILSARLCAAWLSEKKYLQLRDHSGLYAQWLTRLPAIYRNSSQRLNPLTIDVSKANEVSSQRNRKRFTATNIHVTSHGTEFTLQTPTGSVDVLLPLPGRHNIANALAAAALSMSVGATLDAIKAGLANLKAVPGRLFPIQLAENQLLLDDSYNANVGSMTAAVQVLAEMPGYRVLVVGDMAELGAESEACHVQVVRNDGPEYTSASAVRRPWAGL

SEQ ID NO: 60023 - protein, 89 aa, Homo sapiens
  misc_feature (1)...(89): Xaa = X or * as defined in Table 2
QEGRCQVTITRKMPLSSDLGSLHGLAGNHSPPICARTPHVATVLRQLLELEDKHWNGSGXFARLGWKPQSPHLCQNPPCGHCPQTAPGA

SEQ ID NO: 60024 - protein, 67 aa, Homo sapiens
MISPDDDPSQEAGALSRNNLLAPYSALTFMENGNCLLQLFQLGKLLVQASHLHGQLLVFVQKIIISM

SEQ ID NO: 60025 - protein, 27 aa, Homo sapiens
GWKPQSPHLCQTPPCGHCPQTAPGACG

SEQ ID NO: 60026 - protein, 493 aa, Homo sapiens
  DOMAIN (408)..(463): Isochorismatase family domain identified by eMATRIX, accession number PF00857B, p-value=6.806e-38, raw score of 33.04
  DOMAIN (287)..(469): Isochorismatase family domain identified by PFam, accession name Isochorismatase, E-value=3.3e-66, PFam score of 233.4
MEPKQIARVVRQQEALFSSVYEGLIAVDPHGYITAINRNARKMLGLSSPGRQWLGKPIVEVVRPADFFTEQIDEKRQDVVANFNGLSVIANREAIRSGDDLLGAIISFRSKDEISTLNAQLTQIKQYVESLRTLRHEHLNWMSTLNGLLQMKEYDRVLAMVQGESQAQQQLIDSLREAFADRQVAGLLFGKVQRARELGLKMIIVPGSQLSQLPPGLDKSACSEATEASGAGNMAWNASGNIARTEPDMLSITLSKKLCCFGDRIIEIPETIDQPVSFCILTGPDVALGNFINLLRRRMTRISNQRDSTVDVANRLIDWCQSRGEAVIASQDWHPANHGSFASQHGVEPYTPGQLDGLPQTFWPDHCVQNSEGAQLHPLLHQKAIAAVFHKGENPLVDSYSAFFDNGRRQKTSLDDWLRDHEIDELIVMGLATDYCVKFTVLDALQLGYKVNVITDGCRGVNIQPQDSAHAFMEMSAAGATLYTLADWEETQG

SEQ ID NO: 60027 - protein, 608 aa, Homo sapiens
  DOMAIN (136)..(191): Isochorismatase family domain identified by eMATRIX, accession number PF00857B, p-value=6.806e-38, raw score of 33.04
  DOMAIN (13)..(197): Isochorismatase family domain identified by PFam, accession name Isochorismatase, E-value=1.3e-82, PFam score of 287.9
RRMIKETVMPPRALLLVDLQNDFCAGGALAVPEGDSTVDVANRLIDWCQSRGEAVIASQDWHPANHGSFASQHGVEPYTPGQLDGLPQTFWPDHCVQNSEGAQLHPLLHQKAIAAVFHKGENPLVDSYSAFFDNGRRQKTSLDDWLRDHEIDELIVMGLATDYCVKFTVLDALQLGYKVNVITDGCRGVNIQPQDSAHAFMEMSAAGATLYTLADWEETQGTPHVATVLRQLLELVDKHWNGSGSLLLNRSFSTVIHTNPTNQNVLLLFSGHPIALQPGIQYLCSLQDLNLYYNNIPSLVEVSRLQPLPFLKELDLRLNPVVRKDTDYRLFAVYTLQTLEKLVLPFPECHIVGIIQSLVVTNEYLLQQLNKEPKGYSGKALLPPEKGHHLGRSSPFGKSTLSSSSPVAHETEALTAIATSMVLPLSAIPPAVTATARETTRRTPGPAHCPAPRARAAATPGTVIGRVTSPPARCWSRDHASICGLDPRILPPKLLLGNHLGQLHPMTTYAPPVIDSPEKMEFKVIGPIGPDIFTRLLRTQLSSPVLRFQLGHNIGGQKTDSQGTNWNSQDDLLHKNQQLTMQVACLNQELAQLKKLEKTVAILHESQR

SEQ ID NO: 60028 - protein, 44 aa, Homo sapiens
  misc_feature (1)...(44): Xaa = X or * as defined in Table 2
LNTKSAKXVGGSSRVNVPQVFISLVSQMFSENDLPLVRKRKTEP

SEQ ID NO: 60029 - protein, 263 aa, Homo sapiens
FLARECPHPAIVGAQVREFLPCVARHAVENRFFTVDHFIMRQRQDEVFSVVVENPEGQFIVMILTINRVELHVVQGVMHPAEVPLVPEAQTAHILRTRNAREIGRLLSHCHRTGNLLTKNTVGITQEFNRFKILAPAKFVRDPLPLFTGINTKTVHPVKRVTDEKVTDFTATIVVDQRVPVLMIAFTRIAVFIQVRAIKFGKRKVISREVAWHPVENHVQTSCVCGINEITEVVASTKTAGWRIQAGWLITPTAIEGMLVNVQ

SEQ ID NO: 60030 - protein, 372 aa, Homo sapiens
  DOMAIN (19)..(247): Domain of unknown function DUF28 domain identified by PFam, accession name DUF28, E-value=1.2e-113, PFam score of 390.9
LTLPEQAGLSGDIFMAGHSKWANTRHRKAAQDAKRGKIFTKIIRELVTAAKLGGGDPDANPRLRAAVDKALSNNMTRDTLNRAIARGVGGDDDANMETIIYEGYGPGGTAIMIECLSDNRNRTVAEVRHAFSKCGGNLGTDGSVAYLFSKKGVISFEKGDEDTIMEAALEAGAEDVVTYDDGAIDVYTAWEEMGKVRDALEAAGLKADSAEVSMIPSTKGRDLQQSKLRAVLRGHFPTDDFALAEFDGTNLYEHSDPREGYHQDWNTLIYNYGRREVSNFLVGNALYWIERFGIECCASMRRKEGEWIPNEFGGRENLEAIEFLRNTNRILGEQVSGAVTMAEESTDFPGVSRPQDMGGLGFWKKTVQGIRN

SEQ ID NO: 60031 - protein, 44 aa, Homo sapiens
RFPTVMKRVRLWHLPARKIRILRLLPAPIMTMKWRISPNVVRIR

SEQ ID NO: 60032 - protein, 68 aa, Homo sapiens
  misc_feature (1)...(68): Xaa = X or * as defined in Table 2
SEPVYPLCYLRQLAVQANPRRMRCIARHFNINGNRHLTTTINFIXSMVSLIANRLLIIDLIHTVDFYH

SEQ ID NO: 60033 - protein, 76 aa, Homo sapiens
LGFVEMLATVIGLRGVMPVEISTTRRRPWRNSDFQRMINNLGTAFHVNTCCICHFFRIATSNLHGANTGFINVHHP

SEQ ID NO: 60034 - protein, 64 aa, Homo sapiens
  misc_feature (1)...(64): Xaa = X or * as defined in Table 2
YRNSHNLLQGWQIHRGDLLYHSSPHSRXKHRNRHNARARIPAAIHDNLACVQPTLSAFHQDMCS

SEQ ID NO: 60035 - protein, 1395 aa, Homo sapiens
  DOMAIN (1014)..(1060): DEAD-box subfamily ATP-dependent helicases proteins domain identified by eMATRIX, accession number BL00039D, p-value=8.125e- 39, raw score of 21.67
  DOMAIN (983)..(1056): Helicases conserved C-terminal domain identified by PFam, accession name helicase_C, E-value=1.4e-16, PFam score of 68.6
MRNVPELMSDIRQDGRFCSASGADSVVVRMLCDGAIQKSCRVTDTTTNQNLLIAGNLTCRIDSRHNRIACKDHAIGLIRHLTGEIILRQPLSDNIYGIYSCRRKRRKRGHAQRDTRQKAHGQTTRRDENRVRLNVVSADITDITTPDGRETKFYYNDGNQLTAVVSPDGLESRREYDEPGRLVSETSRSGETVRYRYDDAHSELPATTTDATGSTRQMTWSRYGQLLAFTDCSGYQTRYEYDRFGQMTAVHREEGISLYRRYDNRGRLTSVKDAQGRETRYEYNAAGDLTAVITPDGNRSETQYDAWGKAVSTTQGGLTRSMESMLADLRGTDWLRKKAAMNHSLKPWNTFGIDHNAQHIVCAEDEQQLLNAWQYATAEGQPVLILGEGSNVLFLEDYRGTVIINRIKGIEIHDEPDAWYLHVGAGENWHRLGAHAAYYGFSAIYWQAAGYSASAVGYLWSLGVVAEVIIFALSNKLFRRCSARDMLLISAICGVVRWGIMGATTALPWLIVVQILHCGTFTVCHLAAMRYIAARQGGLLCRRDGRQYRYHDRFRRFPVSISGPRRVLGNGAGGASANVFAPESCSLMLIRAFCGSAPVDVLSASGPYDHGGLNVTTRQSAPAAWRVIQYFPHASRVNGRANIPRWDSRGPDQVEVWAFCITDKAASDEVKAAFENSATRAFGPAGFLEQMTRRTGGDEMSAQVSLELHHRISQFLFHEASLLDDWKFRDWLAQLDEEIRYTMRTTVNAQTRDRRKGVQPPTTWIFNDTKDQLERRIARFRAQERHKNVPKDARERLSGYSGHRVMHCRSNKMRKYRIRHYCGTGVWQQCRMRRERLIRPTVGHRLSHCRSDKIAQASHPTLLRHWSLATAPDAARAPYPAYVLMPAKMVNYLGYQFAVHHFGFCSEQFLNHFNQLMIRWAFIARDRRMQLVDRQTTRPAFAHRSQCIVEQTIKFIECHARQRTNIHTQLTASANTVRSVATVNMPEVERRVGTVALVSTLRHQQLYLEGRVNVLVATDVAARGIDIPDVSHVFTFDMPRSGDTYLHRIGRTARAGRKGTAISLVEAHDHLLLGKVGRYIEEPIKARVIDELRPKTRAPSEKQTGKPSKKVLAKRAEKKKAKEKEKPRVKKRHRDTKNIDYEDSRDDGWQREVSDDRRRQYDDRRRQFEDRRRQLDDRQRQLDQERRQLEDEERRMEDESGSPVIYDWPGGTCLRRIYSSMKQPGEELQETLTELDDRAVVDYLIKNPEFFIRNARAVEAIRVPHPLWQQGYGQGNAEYSVTDASGKMFTINCTGNPDQNGIYQHSVFLILAGDKTVSSHDDSTGITVVMDHKQYAIPSTLGWRNGDNAWFSFIMDIRKARQFDVYVNDQKVGSFNPHVRNAQKVLPTLADCTND

SEQ ID NO: 60036 - protein, 302 aa, Homo sapiens; identical to SEQ ID NO: 41089
  DOMAIN (14)..(300): Zinc-binding dehydrogenases domain identified by PFam, accession name adh_zinc, E-value=0.016, PFam score of -74.6

SEQ ID NO: 60037 - protein, 59 aa, Homo sapiens
  misc_feature (1)...(59): Xaa = X or * as defined in Table 2
GEFDVNIAAVVLPDVAXTPYPAYRRDLIAIGQCVVIDQCVFLIRVTNPAGSFFELRIHH

SEQ ID NO: 60038 - protein, 277 aa, Homo sapiens
  DOMAIN (195)..(226): Orn/Lys/Arg decarboxylases family 1 pyridoxal-P attachment si domain identified by eMATRIX, accession number BL00703I, p-value= 3.250e-33, raw score of 14.40
  DOMAIN (117)..(269): Orn/Lys/Arg decarboxylase domain identified by PFam, accession name OKR_DC_1, E-value=9.2e-83, PFam score of 288.4
KQNDERAPPGAEAAGEGRTPRQERKKARNRDRPRQKKTRTKEDNRTPQEEDDQRLKKKRTTKKAPGSSSNTQRQPDGRHRTRGNLKGRPPPTNPPEKKGEHQGRKKPTPPKKKRIPDFKRAFDLNLRVKNMLPSLYREDPEFYENMRIQELAQNIHKLIVHHNLPDLMYRAFEVLPTMVMTPYAAFHKELHGMTEEVYLDEMVGRINANMILPYPPGVPLVMPGEMITEESRPVLEFLQMLCEIGAHYPGFETDIHGAYRQADGRYTVKVLKEESKK

SEQ ID NO: 60039 - protein, 64 aa, Homo sapiens
  misc_feature (1)...(64): Xaa = X or * as defined in Table 2
DYAFILQSKRTVALDIKQTGVIQGLPLLFSGNNLVKAIRSGTHXRCTNATAGGRSYRKRXIRTG

SEQ ID NO: 60040 - protein, 520 aa, Homo sapiens
  DOMAIN (436)..(467): Orn/Lys/Arg decarboxylases family 1 pyridoxal-P attachment si domain identified by eMATRIX, accession number BL00703I, p-value= 5.950e-33, raw score of 14.40
  DOMAIN (274)..(510): Orn/Lys/Arg decarboxylase domain identified by PFam, accession name OKR_DC_1, E-value=6.3e-138, PFam score of 471.6
NVRVLSAVSGINSDDNFIASVSRRARCRTRYSITADNTRSAVTFRFNRYARRFADARCDTRRRFNAFRNHGRRRSWWRHIGVNRKDDSVIVAILPLHRFGFTVFGAFEQDKAVECDCCEQQTSVYYSGPFYCVDEVEHLCPWCIADGSAAEKFAGSFQDDASIEGVEFEYDEEDEFAGIKNTYPDEMLKELVERTPGYHGWQQEFWLAHCGDFCVFIGYVGWNDIKDRLDEFANLEEDCENFGIRNSDLAKCLQKGGHCQGYLFRCLHCGKLRLTWHGFKNIDNEHMYLDPIKVTLLTPGMEKDGTMSDFGIPASIVAKYLDEHGIVVEKTGPYNLLFLFSIGIDKTKALSLLRALTDFKRAFDLNLRVKNMLPSLYREDPEFYENMRIQELAQNIHKLIVHHNLPDLMYRAFEVLPPMVMTPYAAFQKELHGMTEEVSLDEMVGRINANMILPYPPGVPLVMPGEMITEETRPVLEFLQMLCEIGAHYPGFETDIHGAYRQADGRYTVKLGFDDNHAIS

SEQ ID NO: 60041 - protein, 73 aa, Homo sapiens
WKHCVFLVVVKLKLKVFVLLRKISANGQWKCYGWRFYPPAFSNFLPRCQLLWWRSTLVFPISASWILVTTIPV

SEQ ID NO: 60042 - protein, 114 aa, Homo sapiens
TTHKTRWQAPVPLRGSPVVALRIPSDQSEAVHSLSGVLIALFRTHRFLSGRMFPDHRVWFRMIGSELVPGYRLSWLSFFNRHYICFTRIRRFRWHRSSLFHGMNVKYRRSKINN

SEQ ID NO: 60043 - protein, 87 aa, Homo sapiens
  misc_feature (1)...(87): Xaa = X or * as defined in Table 2
ATILXGDFYPGSRNWLGVSSSAIQMAGCVSLPGAGKRCSPXICWSNWKQTSRTSGHVLAGSCCWNGKTLRKSDSRWQQLLRRSLIRR

SEQ ID NO: 60044 - protein, 87 aa, Homo sapiens
SAMVARVCSLSHGQPFSGSRRRCIIVSKRTQDNSWTMSSLLATFCRVKINPNQIAHIGYVSAYHYQTSLSFGSPQSIFSWRFSAGCL

SEQ ID NO: 60045 - protein, 56 aa, Homo sapiens
  misc_feature (1)...(56): Xaa = X or * as defined in Table 2
LISTPRKKVRTXSFAGLLRISSGVPTCTTSPFCIMAIRSPIRMASSRSWEIKTMVR

SEQ ID NO: 60046 - protein, 429 aa, Homo sapiens
  DOMAIN (294)..(312): Shikimate kinase proteins domain identified by eMATRIX, accession number BL01128B, p-value=3.903e-11, raw score of 16.11
  DOMAIN (267)..(392): Shikimate kinase domain identified by PFam, accession name SKI, E-value=5.3e-09, PFam score of 40.2
VSPRTAVHHGPRNAPGLMNFPFEGLTSGSKYGTAVGIIMFMLVIGGAFGIVMRTGTIDNGILALIRHTRGNEILFIPALFILFSLGGAVFGIAMSTPLQGIKVLDFTGVQSGPSCTQMLAWFGADVIKIERPGVGDVTRHQLRDIPDIDALYFTMLNSNKRSIELNTKTAEGKEVMEKLIREADILVENFHPGAIDHMGFTWEHIQEINPRLIFGSIKGFDECSPYVNVKAYENVAQAAGGAASTTGFWDGPPLVSAAALGDSNTGMHLLIGLLAALLHRELNMTVAEIVEREEWAGFRARETAALEAVTAPSTVIATGGGIILTEFNRHFMQNNGIVVYLCAPVSVLEDFRQRTMEVLRPGVFILRHSRIFYLAVNCSGGGLLWFFLSRRAGFWSLRYRCDAGCGFSGPDPCARVFPAITRSRYVLSC

SEQ ID NO: 60047 - protein, 65 aa, Homo sapiens
RLREFVGLIRRASVASGSRHRCRMRRKRLIRPFTFRSLMMVTLSPSASRLPLASLTISSSLSCAG

SEQ ID NO: 60048 - protein, 530 aa, Homo sapiens
  DOMAIN (93)..(115): FLAGELLAR BIOSYNTHETIC PROTEIN FLIP SIGNATURE domain identified by eMATRIX, accession number PR00951E, p-value=1.360e- 24, raw score of 12.13
  DOMAIN (1)..(139): FliP family domain identified by PFam, accession name FliP, E -value=4.4e-59, PFam score of 209.7
MSPVIDKMYVDAYQPFSEEKISMQEALEKGAQPLREYMLRQTREADLGLFARLANTGPLQGPEAVPMRILLPAYVTSELKTAFQIGFTIFIPFLIIDLVIASVLMALGMMMVPPATIALPFKLMLFVLVDGWQLLVALVTGLIISILQAATQINEMTLSFIPKIIAVFIAIIIAGPWMLNLLLDYVRTLFTNLPYIIGRTMLQVTSEQWLSWLNLYFWPLLRVLALISTAPILSERSVQNGWYPSATLSSTNWQYACSCSAGKRHSRTHNRPGCLWLTKARRCAVFVYVTISPAKLRPFMHLSWLMPLGFWGGNTVARILPDLRRFACNIYKGRVSRVLPGMQAAFVDIGLDKAAFLHASDIMPHTECVAGEEQKQFTVRDISELVRQGQDLMVQTLTPQSLCLMSNLRKFWDMGHVFWFSEIFDKRWCNLVKLLVLCFLFCRLFRAIPRCGEIFARRQVRYLPAVINIEAARLGFLLVGNASFARNSKPMEFRTRKTPSIKSGAFASKERSNSENALIWKISSKLTDIP

SEQ ID NO: 60049 - protein, 1806 aa, Homo sapiens
  DOMAIN (667)..(709): 72 PYRUVATE (FLAVODOXIN) DEHYDROGENASE domain identified by eMATRIX, accession number DM01785D, p-value=8.024e-38, raw score of 16.14
  DOMAIN (1330)..(1417): Trp repressor protein domain identified by PFam, accession name Trp_repressor, E-value=8.5e-57, PFam score of 202.1
MVKVAGECRVRASAHLPGLNRSTKNTEDRGANNQEGTNTQKTRGETNERLKKNEHRDLRLARYPAKENNKQGDKNKPRTYEKLTGTVTHQEPPHHADQSPGLCLFRTSRAQVERGPTVLLLISQENQIERYDSDNHSQLNLCLRVPTVTTQRRDYDIAERYRQKGIKLPARKERLMTIAERLRQEGHQIGWQEGKLEGLHEQAIKIALRMLEQGFDRDQGIAVEHRVNANSDKVRSPRQALLRHIRSHSQKTSRFTRSTDPPNTGFNNSLHFRVPGVIRVAQRRRKIRRSNKHAINPFDVEDFVQVIQCRFTFHLHQQTKRIVTCAIEIIHRLFNMVIDRVVPWVGGFARLEISVRIGGRTADHRMFRVECPGAMSINFDLRHEIKNRVIGQRDNFIDFVGRAETIKEMNKWHAAFQRRDLRNESKVLRFLDVCCTQHRATRLAHRHNVGMIAKNRECMCGNGTCRYMQDKRVFNIRSAPLRHQVGSQIGRHEAGRRTLRSPPPDPPPNAPGVRTPRVRESTATGPMATTRWEKRHIAEEIPIWKEELCTQCNHCVAACPHSAIRAKVVPPEAMENAPASLHSLDVKSRDMRGQKYVLQVAPEDCTGCNLCVEVCPAKDRQNPEIKAINMMSRLEHVEEEKINYDFFLNLPEIDRSKLERIDIRTSQLITPLFEYSGACSGCGETPYIKLLTQLYGDRMLIANATGCSSIYGGNLPSTPYTTDANGRGPAWANSLFEDNAEFGLFPPDGRSTPCPHAASDRLVREIHKSLPHGPKCNSEYTYEDNGMYICPECAYEWNDAEPAQESDELIVKDANGNLLADGDSVTIIKDLKVKGSSSMLKIGTKVKNIRLVEGDHNIDCKIDGFGRIRRLRRIRQQCQLPDATLARLIRPTNSRTIRRPIRRYPHPQQLKSWRKCRITDDTAENRHCVQTDLDHGKEHAGIFLHIQNALGIYIAFISHQFKFDFAPDPRKGKLINLCEIHIESRFEESEPAFLSGIVLRRHMTDANSANSKMHAAALPHHVLRAGVESAVACPGGWGPWGEHGHVDLDTHSANIYEAPAVECTGRCQSVQQVIVNAKRGPLCPHGPSLVGAGRVRKTFNSSQQMPVCLIEPVFASKLIPVRAIFGSIGPIVQGKSTLFRMISAQEQPDSGTITLGETVKLASVDQFRDSMDNSKTVWEEVSGGLDIMKIGNTEMPSRAYVGRFNFKGVDQGKRVGELSGGERGRLHLAKLLQVGGNMLLLDEPTNDLDIETLRALENALLEFPGCAMVISHDRWFLDRIATHILDYQDEGKVEFFEGNFTEYEEYKKRTLGADALEPKRIKYKRIANFSTKLLFVDLLKNAYLYDLHLPLLNLMLTPDEREALGTRVRIVEELLRGEMSQRELKNELGAGIATITRGSNSLKAAPVELRQWLEENHRRQRQSSRTRLAALAGVFNHHPTESAVTIDASFNRHPGEETRQSRYEDEGEDTRERGVILSVHGEPKQQSPAKSRVIQFFQQGFVIRTYSDAQAGAKILRIGHFLSSNTKLWIGFQPFVYHRCVTKYPINTTIFQIDKGILITVIRDSFHFRVLILNIFLASTGGHFLSRITCRVQYFLSKSLRISGSFLWSKRARLFSFCGGGLPAYGPLRVIWLWMLLDLRSCLPAPMSSRGSGHRCFGDSQPATVVLRTRRWKLFLIPEEYSPPQVLVDTDRFLEMNRQRSLDDGFMHAVFNPSFNALATAMATARHRASKVLEIARDRHVEQALNETPEKLNRDRRLVLLSDPVTMARLHFRVWNSPERYSSWVSYYEGIKLNPLALRKPDAASQ

SEQ ID NO: 60050 - protein, 40 aa, Homo sapiens
  misc_feature (1)...(40): Xaa = X or * as defined in Table 2
LCQSHAPRKFPARPFRFFRXRQDCQTSVFLLRPVANRAPA

SEQ ID NO: 60051 - protein, 238 aa, Homo sapiens
MNGTIYQRIEDNAHFRELVEKRQRFATILSIIMLAVYIGFILLIAFAPGWLGTPLNPNTSVTRGIPIGVGVIVISFVLTGIYIWRANGEFDRLNNEVLHERGRRAPANELAGDSYVPDFRRVYARHYLLGIKRVRSRRIRRLPRIRQRCRLPDATLARLIRPTNSRTLRRPDKGVYAASGNSANCLMRRLRVLSGLQIPAPSVGRIRRLRRIRQSGARCPDATLARLIMPTAVAAPAG

SEQ ID NO: 60052 - protein, 404 aa, Homo sapiens
  DOMAIN (192)..(235): Flagella transport protein fliP family proteins domain identified by eMATRIX, accession number BL01060A, p-value=3.893e- 40, raw score of 15.65
  DOMAIN (177)..(295): FliP family domain identified by PFam, accession name FliP, E -value=1.7e-14, PFam score of 50.9
MGSKIFHNLIPYCTTGRIRRLRRIRQQCQLPDATLARLIRPTNSRTIRRPDKAFTPHPATQHEETTQDDEVNTANRSEHADEASREQKRQRQRCLHRRYNSQPWRAAQTATSLVRTTPIRTPNRKPPQAHRPPSKSGSPKNPCPGKPRPKKYPRSSLEDPQLQITPGFCFTSQTLVLITSLTFIPAILLMMTSFTRIIIVFGLLRNALGTPSAPPNQVLLGLALFLTFFIMSPVIDKIYVDAYQPFSEEKISMQEALEKGAQPLPLSGVNSDVYVAATTKSIGFAGKTVVVQGDALGIAGIQFTSGQHRLYLADKMWKYHIQLRTFGVTKLTGDTGPRKKTTHERRRENEREQSTQAATLYGPDARYDGDADANGEIWRSDDGVNFVNQTSQTFDVIIWYRPDL

SEQ ID NO: 60053 - protein, 100 aa, Homo sapiens
  DOMAIN (29)..(67): DAHP synthetase family domain identified by eMATRIX, accession number PF00793D, p-value=2.038e-37, raw score of 21.68
  DOMAIN (1)..(96): DAHP synthetase family domain identified by PFam, accession name DAHP_synth_1, E-value=0.055, PFam score of -229.5
KCLPVVSSSAVAVCPLAHIHDGTIKVAIDAINAAGAPHCFLSVTKWGHSAIVNTSGNGDCHIILRGGKEPNYSATTLHTRGFRVAVITFPDRVLLRGCCP

SEQ ID NO: 60054 - protein, 81 aa, Homo sapiens
  misc_feature (1)...(81): Xaa = X or * as defined in Table 2
AFAKLFIMAAALTSGVAHLSSSGTPFRPFCLPSCXLSSSRAAAISTCSLYAAWFPLTLIRCRGIRKSPIICGISRCRCWRQ

SEQ ID NO: 60055 - protein, 146 aa, Homo sapiens; identical to SEQ ID NO: 39464

SEQ ID NO: 60056 - protein, 30 aa, Homo sapiens
ISMLRWPGTSAPLLITFVDSGERVRLLRVP

SEQ ID NO: 60057 - protein, 169 aa, Homo sapiens
RFHIGLGEFAVDREGAGNIASVTLVFTTRVNQHQVAVAHFTLVFGVVQNAAVFTAADNGVIGRIARTVAVKFVVNFAFQMVLEHSRTAFFHRPCMCHGGDFSRAAEYGNLFWRFEQAHFMNNRTPVDHRCRCGEILPRTFTQFFQRTVHDYISICIFALGMVNHIQAVK

SEQ ID NO: 60058 - protein, 30 aa, Homo sapiens
RATSSLRHSPTKSLPIHVTAAGSDFVYRNS

SEQ ID NO: 60059 - protein, 163 aa, Homo sapiens
  misc_feature (1)...(163): Xaa = X or * as defined in Table 2
FFGLVTSSPSADSPAMLDTRNVSHTGLGPIIPLTFEAGIHTRPTPNSPPRSCLAPAIKAXFFSPAARITTCCASLYRSPLKTLRSVRFWRSSASVLMRRSSSAAPMPEATLRVLSGLRGSRSDKAFTPHPTIXCLEAFPGSRAFVASAPXCLTLRANQRKGCW

SEQ ID NO: 60060 - protein, 160 aa, Homo sapiens
  misc_feature (1)...(160): Xaa = X or * as defined in Table 2
SLLAWLSGINIFASSRIAIASPLAASVPLSMDNISLCTPSGVPEKVTSTVLTSVPQSCKLMMKDFSGPXFPXEKRVSETSPNCTLICLLSCASTHVLRRNDPLMLTVPSWANSSQPHVNPNKNRIQIIPFNITPSLVNQIKIETRRAFTPLLPLCGLITK

SEQ ID NO: 60061 - protein, 171 aa, Homo sapiens
GDGVSVGQVATFHYVIKTHSGVCRTSGKARVNLHAVHAGIVNLQLPGAAVNVGTDDIAVEVVHAATSLITSRRYTNRIGLRHIRQRIVAIMHFAAITVVTVHTFNIDAVALLDQSRTRNPIGNHHRAVVNHMTYCTQYAKCKRVIGEDIDGAVVFDYRIRRGVGIELHTDH

SEQ ID NO: 60062 - protein, 156 aa, Homo sapiens
  misc_feature (1)...(156): Xaa = X or * as defined in Table 2
MQRRDGDIALIYRSKIGPRTSITFTARRANPVQRIAARILLRDHLICRMSCTAARHANTFDLIQGSGADNFAAIYGGANDRITRADAVSRGCWKLAPVRDIKRQTVAAFYHQDIQPGSCHDQNALXSTGFWREQSGGQXPXAGXTNSRTRCCITGR

SEQ ID NO: 60063 - protein, 190 aa, Homo sapiens
HCTGVMTCVNSGGYLLTFCTWRGQPRSATVLIGLYSATRITSALGFGGSTPTYTKSAPAAWAKDWRNIPGRICAGAGMRKANSTICISLHQNRRISTGRIQRSFCWPTKCSPWTISTRFYSVSRAAHTGWHLVLFLISIISIRCDCWISPRSLLGLCPSPFRSIIWMQSALAAYVQTATSGATIRRWASQ

SEQ ID NO: 60064 - protein, 52 aa, Homo sapiens
MRPWNSRMPRLGRTISTCSLYAAWFPLTLIRCRGVRKSPIIWGISRCRCWRQ

SEQ ID NO: 60065 - protein, 80 aa, Homo sapiens
  misc_feature (1)...(80): Xaa = X or * as defined in Table 2
RLGTVGTDSLWCYQYQLCYQXALPFSTLPAKLAGNGCQRRRCAGTHSLWHADLGSVWPDADSLFQRDGRAGGGATRLLRR

SEQ ID NO: 60066 - protein, 83 aa, Homo sapiens
PRSQRTSGLSPMPDSSSWSSAIFTPVNSRKAPKIYRIQSNCEISQLPVKIMMVRRTISPRSNGPVINPHGHTAGSCNAAGTEK

SEQ ID NO: 60067 - protein, 249 aa, Homo sapiens
  DOMAIN (153)..(178): ACRIFLAVIN RESISTANCE PROTEIN FAMILY SIGNATURE domain identified by eMATRIX, accession number PR00702E, p-value=6.108e- 25, raw score of 7.83
  DOMAIN (36)..(226): AcrB/AcrD/AcrF family domain identified by PFam, accession name ACR_tran, E-value=1.3e-96, PFam score of 334.3
NANVRNPQGALEDGTHRWQIQTNDELKPAAEYQPLDVRNAGMTNAKPAILLMIRKLPEANIIQTVDSIRAKLPELQETIPAAIDLQIAQDRSPTIRASLEEVEQTLIISVALVILVVFLFLRSGRATIIPAVSVPVSLIGTFAAMYLCGFSLNNLSLMALTIATGFVVDDAIVVLENIARHLEAGMKPLQAALQGTREVGFTVLSMSLSLVAVFLPLLLMGGLPGAELLTRNLAVNAFLSPLVYRCWFL

SEQ ID NO: 60068 - protein, 81 aa, Homo sapiens
  misc_feature (1)...(81): Xaa = X or * as defined in Table 2
PTPQHLTYHALTGSTIMSQRGVDIPCHWHDITCGHAHSLPHRRGRKAXSMGNRXYSCTWCYCEGGTEKAIWPGDGCPGLSV

SEQ ID NO: 60069 - protein, 193 aa, Homo sapiens
  misc_feature (1)...(193): Xaa = X or * as defined in Table 2
XLTIAVTAHEGDIFTEQFKQRFNTFKYRFITANHNRQRPFTRTDFTAGDWRIEIIAAQFIHLTSETLSFNRGNGAHINNGFALQRGFGTTIFTEQNFFNLSHHTDVSWLSMLYLPWPFTFHYCAVDVKRRASATNEAFLIFLTPVMMVSLMMAADPSLLATPRTYLMSHMPWLPFLLILLPANIMTMVMYAFX

SEQ ID NO: 60070 - protein, 49 aa, Homo sapiens
CSRVVGIPDSPGVNGSPCLERRRGASSGAPGKWVGISVNLSPGLPQCTQ

SEQ ID NO: 60071 - protein, 705 aa, Homo sapiens
  DOMAIN (459)..(481): Glycosyl hydrolases family 38 domain identified by eMATRIX, accession number PF01074F, p-value=7.181e-09, raw score of 14.65
MSAAQIGFLSRRSRSARLLRERFWFVDYRRVVIAGLVELRHFRQTPPQVDHRLTAHEGDIFTEQFKQRLTRSNTASSPPTIIDNVLHAHRFHRRRLAHRDNPAQFIHLTSETLSFNRGMELISTMVLPFSEALVNHFHRTELLQPEVCPAHNKNDVRCFRYLASSFKLTAPSDSNSSATDLFSTRPTRHNKSKKNNRDTDQTNNRNPKTKRRHPRTKNGNNKTTGFQLCANIIRHRERGVLLTAELPVAAVTKLCLRVYHALWRLRRLHHCCTQVNCPDMVPQSISAKFFRGYIYDASRCFLPFCGFRGFPVGFCSGSRDTAEPSNGGPMPRIGLRATKFQDHIAAHEHCRICPQPHPSGKPGTVITGHSGERFSPPWKTQFPGAVLDESDKRLNRDAACYAEYGTTHSGHGLLDRQIDRALRFDHPTPTTAIFQNNCIPLPEGRYLRVMDRMTCNVFQHHDGVIHTKPVAMVSAINERLLRRIRTGKSGKSRLRRDDEHYGAEATNALLPGKASSIRRVKRTEEETVCGALWMGEQWLHELKDTADAVPWNEFLSHGQRRKATNHCRQHRQVIVHEQRVDTTPNCGNMLSGVGAFAIENGLIAATSPVTRVRIRNVNTGTFIEADVQTPNGVVEYEGSARIDGVPGTAAPVALTFLNAAGTKTGKVFPTDNQIDYFDDVPVTCIDMAMPVVIIPAEYLEKQNPR

SEQ ID NO: 60072 - protein, 43 aa, Homo sapiens
YGSILTSSHARMRAHLHAGAYAGCTGRTKNLVELAQLARENDA

SEQ ID NO: 60073 - protein, 685 aa, Homo sapiens
  DOMAIN (296)..(460): ABC transporter domain identified by PFam, accession name ABC_tran, E-value=2.7e-22, PFam score of 87.5
  misc_feature (1)...(685): Xaa = X or * as defined in Table 2
LQCTQYAVGENPAVNFAGRPKGSPCFGPGGGLINXAAADIPVASDNPAHYADAIRYNARTPLQAGVYFVRDGPGPLASVRNKERYFANNYIYDMGRNKDGRQSTWYMGLGTDIDTGLPMSLSMNVYAKYQWQNYGAANENEWDGYRFKIKYFVPITDLWGGQLSYIGFTNFDWGSDLGDDSGNAINGIKTRTNNSIASSHILALNYDHWHYSVVARYWHDGGQWNDDAELNFGNGNFNVRSTARGWLPGTICRPDKMRQHRIRHCAPIAGCGTGCRPDKTRQASHQAQMSNAYDYSEIQPPSEGEILLDAQPLESWSSKAFARKVAYLPQQLPPAEGMTVRELVAIGRYPWHGALALLGAADREKVEEAISLVGLKPLAHRLVDSLSGGEPGVDRMLVAQDSRCLLLDEPTSALDIAHQVDVLSLVHRLSQERGLTVIAVLHDINMAARYCDYLVALRGGEMIAQGTPAEIMRGETLEMIYGIPMGILPHPAGAAPMNTAHAAAIDPNRIVALEWLPVELLLALGIVPYGVADTINYRLWVSEPPLPDSVIDVGLRTEPNLELLTEMKPSFMVWSAGYGPSPEMLARIAPGRGFNFSVRNTPLARTLQLILREGPRGHPALVQVVDLLIEPPQLPLLVPSVQTRIPRIQPQSHPAHGVNEAVRNPTVWVAPFIDEIISSIHKYSI

SEQ ID NO: 60074 - protein, 528 aa, Homo sapiens
  DOMAIN (436)..(486): Sugar transport proteins domain identified by eMATRIX, accession number BL00216B, p-value=6.786e-11, raw score of 27.64
  DOMAIN (115)..(528): Sugar (and other) transporter domain identified by PFam, accession name sugar_tr, E-value=3.6e-05, PFam score of -47.0
MWERQKQKTGCPPRYMRGETRGNDLWHPDGYFAASGGCCTCELGSLMSGLPLIWSGQLLTAMALSPLLWQMNTDHAAAIDPNRIVALDWLPVELLLALGIVPYGVADTINYRLWVSEPPLPYSVIDVGLRTELNLELLTEMKPSFMVWSAEYGPSPEMLARIAPGRGFNFSDGKQPLAMARKSLTEMADLLNLQSAAETHLAQYEDFIRSMKPRFVKRGELPLANREELNLLLNKGILPLCDQRQEIESECAFTIFCAGDANCFPPSPTHLPLTALQQRPCGLSGSASKEAWGRQQICRGPQKISDIRMRGDTRTEALPWRRSQTGKELEFGCTLRVTVLGTFIMLATYTLFYIMTVYSMTFSTAAAPVGLGLPRNEVLWMLMMAVIGFGVMVPVAGLLADAFGRRKSMVIITTLIILFALFAFNPLLGSGNPILVFAFLLLGLSLMGLTFGPMGALLPELFPTEVRYTGASFSYNVASILGASVAPYIAAWLQTNYGLGAVGLYLAAMAGLTLIALLLTHETRHQSL

SEQ ID NO: 60075 - protein, 396 aa, Homo sapiens
MFPSGKGRLLCTFTIFFILLTQTISEAVYQGTQHKTAKKLEQDAVLAVAMDGPDATVAAGDSKDPEMIEWLPTRLYRWLFRTDMSLPPAALVLATEGSQPSASPEITLIQDREVQGAGSHMHCVQTNSTSEKRPAGLRTEKLPRCRKHSRQQTGDGSGRLHQPLRKNLKKFEKWARQEGIECYRLYDADLPEYNVAVDRYADWVVIKGYCGRWRLNAGGISMIWKRHLTLDELNATSDNTMVAHLGIVYTRLGDDVLEAEMPVDTRTHQPFGLLHGGASAALAETLGSMAGFMMTRDGQCVVGTELNATHHRPVSEGKVRGVCQPLHLGRQNQSWDIVVFRLNQAALGRLAWQPWLPGPLAGLPGATISPGAHLRTQAPPPQSGKVLQDKPSLMLK

SEQ ID NO: 60076 - protein, 80 aa, Homo sapiens
WRTREIFCWSPITLSIMLRRRLKLVTWHSDGGAEITVMKFAIRLYLIRFGSSASAPSVRFLYSSYSVKLPSKNSTLPSSW

SEQ ID NO: 60077 - protein, 72 aa, Homo sapiens
YRLNLIWWKISTPPTAVKAALVTLVVKKQTAKRNRREEILQSLALMLESSDGSQRITTHPSARFLVAISKKW

SEQ ID NO: 60078 - protein, 368 aa, Homo sapiens
  DOMAIN (45)..(92): Bacterial regulatory proteins tetR family proteins. domain identified by eMATRIX, accession number BL01081, p-value=3.475e-24, raw score of 28.63
  DOMAIN (45)..(91): Bacterial regulatory proteins, tetR family domain identified by PFam, accession name tetR, E-value=7e-08, PFam score of 36.9
RHNIAANISFAVIAWVPPGKCLFSGVFCNMAEKQTAKRIRREEILQSLALMLESSDGSQRITTAKLAASVGVSEAALYRHFPSKPRMFDSLIEFIEDSLITRINLILKDEKDTTARLRLIVLLLLGFGERNPGLTRILTEHAIMFEQDRLQGRRSKSGQFSSPATPQPLLMQPQRAACRRALLMRQSHHQLLLAPASVRQVICAEDFQPCPSQSVHRRTADKTRYKQAGGLFVDFNWCANLFGNTAVHHHYSLGERHRFNLIATVQLLQFKTHLHAQLGIQVRERLIKRGTTGLASCSGRSPTQWDTSFTFSVRTEYRCLHVRVSLFRNCAANQTPAKAREEQYKQTGKRNRGLMFPGQAVQPPTAWA

SEQ ID NO: 60079 - protein, 630 aa, Homo sapiens
  DOMAIN (264)..(278): ANTHRANILATE SYNTHASE COMPONENT I SIGNATURE domain identified by eMATRIX, accession number PR00095B, p-value=8.650e-16, raw score of 6.36
  DOMAIN (148)..(409): chorismate binding enzyme domain identified by PFam, accession name chorismate_bind, E-value=2.2e-139, PFam score of 476.5
MYSRFDIVVAEPICTLTTFGKETVVSDSQTRTTTTDDPLQVLQQVLDRADIRPTHNEDLPFQGGALGLFGYDLGRRFESLPDIAEQDIVLPDMAVGIYDWALIVDHQRHTVSLLSHNDVNARRAWLESQQFSPQEDFTLTSDWQSNMTREQYGEKFRQVQEYLHSGDCYQVNLAQRFHATYSGDECQAFLQLNHGNRAPFSAFLRLEQGAILKLSPERFILCDNSEIQTRPIKGTLPRLPDPQEDSKQAVKLANSAKDRAENLMIVDLMRNDIGRVAVAGSVKVPELFVVEPFPAVHHLTITAQLPEQLHASDLLRAAFPGGSITGAPKVRAMEIIDELEPQRRNAWCGSIGYLSFCGNMDTSITIRTLTAINGQIFCSAGGGIVADSQEEAEYQETFDKVNRILKQLENYRRALRDLKEEVAIRLSPFELSAFCSPSIASMATRYPNGRHIPPDLRLPKERGIIIVFTGNGKGKTTAAFGTATRAVGHGKKVGVVQFIKGTWPNGERNLLEPHGVEFQVMATGFTWDTQNRESDTAACREVWQHAKRMLADSSLDMVLLDELTYMVAYDYLPLEEVVQALNERPHQQTVIITGRGCHRDILELADTVSELRPVKHAFDAGVKAQIGIDY

SEQ ID NO: 60080 - protein, 105 aa, Homo sapiens
VKVNLPWAMLLHSGYADHPYSRFDIVVAEPICTLTTDGRCSHISLYAAGIINSDSKGAVIMPPIIGAAIRLITSEPAPVPHRIGSRPAIITATVIAFGRTRRTAP

SEQ ID NO: 60081 - protein, 217 aa, Homo sapiens
  DOMAIN (3)..(213): Methionine synthase, vitamin-B12 inde domain identified by PFam, accession name Methionine_synt, E-value=9.6e-58, PFam score of 205.3
  misc_feature (1)...(217): Xaa = X or * as defined in Table 2
XKVPPRTALVLLPNLLRQHDRYHYALNRQSSDFRHDLSLSSPVLLLVCYLPEDRAGVRIPQIDEPALREGLPLRRSDWDAYLQWGVEAFRINAAVAKDDTQIHTHMCYCEFNDIMDSIAALDADVITIETSRSDMELLESFEEFDYPNEIGPGVYDIHSPNVPSVEWIEALLKKAAKRIPAERLWVNPDCGLKTRGWPETRAALANMVQAAQNLRRG

SEQ ID NO: 60082 - protein, 690 aa, Homo sapiens
  DOMAIN (332)..(346): ANTHRANILATE SYNTHASE COMPONENT I SIGNATURE domain identified by eMATRIX, accession number PR00095B, p-value=8.650e-16, raw score of 6.36
  DOMAIN (216)..(478): chorismate binding enzyme domain identified by PFam, accession name chorismate_bind, E-value=4.1e-145, PFam score of 495.5
MVAGANLGLIRPGLRLRKITVHAGFHLGSYLLMCVTVLITELIPVRGYILRASHLPWAMLLHSGYADHPYSRFDIVVAEPICTLTTFGKETVVSESEKRTTTTDDPLQVLQQVLDRADIRPTHNEDLPFQGGALGLFGYDLGRRFESLPEIAEQDIVLPDMAVGIYDWALIVDHQRHTVSLLSHNDVNARRAWLESQQFSPQEDFTLTSDWQSNMTREQYGEKFRQVQEYLHSGDCYQVNLAQRFHATYSGDECQAFLQLNHGNRAPFSAFLRLEQGAILKLSPERFILCDNSEIQTRPIKGTLPRLPDPQEDSKQAVKLANSAKDRAENLMIVDLMRNDIGRVAVAGSVKVPELFVVEPFPAVHHLVSTITAQLPEQLHASDLLRAAFPGGSITGAPKVRAMEIIDELEPQRRNAWCGSIGYLSFCGNMDTSITIRTLTAINGQIFCSAGGGIVADSQEEAEYQETFDKVNRILKQLENVRFICVNTLDKWHSLEVQSMTRTHQLSPPRCAKDLQACKLDLTCTPYYQGFFDALCRFKVKFRGHREIPIRPTYVRLSTFGPDVQHIRPVKSDADISQLLACHQFAFDMFQRDIFGFRNEPESNAHKRNVQRSVEPERTGSANAIKQCQEGRADNHIRHPVRGGRTEPGAEVPGPKTPPAIPPGEERTHPRKGGRKSTGTSLDQMMNRNQ

SEQ ID NO: 60083 - protein, 46 aa, Homo sapiens
PLGPISWSALALLAGCAHDSPCVPVYDDQGRLVHTNTGFPILDPCW

SEQ ID NO: 60084 - protein, 242 aa, Homo sapiens
WGAIPFHAAIAHTSQGHRCSWLHDQLGDTGLYHWDSLTALLAGCAHDSPCVPVYDDQGRLVHTNTCMKGTTQDNWETAGAIAGGAAAVAISVATALQPCHVGLGVPRGSTQKGARAVDECPYDAYLWGVSKGELKRQSSPASWVSGQEGVAASLRGLQAGQREGEGVHLVGGMGRLGHAVTPFDGIVELLVHGQLWVRGATRGNVLIVRGHVVGGLYVCISDVSFHVQHGHIVHRLVLAHVH

SEQ ID NO: 60085 - protein, 51 aa, Homo sapiens
GVGHCYNDTALLAGCAHDSPCVPVYDDQGRLVHTNTHCSFAINIVITCHRH

SEQ ID NO: 60086 - protein, 38 aa, Homo sapiens
SPVTSSSVRLVCRMMLPFSTLSIRRLMRIFSARKPSRR

SEQ ID NO: 60087 - protein, 54 aa, Homo sapiens
  misc_feature (1)...(54): Xaa = X or * as defined in Table 2
VHDQPSQEIQQRTEAPGAPRSSRRVAQCHPQPGESXSRAQIPPASTPKPGGGDL

SEQ ID NO: 60088 - protein, 237 aa, Homo sapiens
MVLLKSLNQGGPDGSCDSSFSSGISVFTAASLGVDEIPANYRLSTSRKVHQSRRSQSNRTFTEFPMSQSAHSAWIPVSPCTFRANRTRYVPFRCTISAFPMTDPEIPITFSFAPYRTTNEIRVARRAVHTRIPVREPKRDPNAYSVHDAASKPSRIELSSSIDYIPRRYDRPPLGHEHSVRSRQIRDPPTFASGRRVDRGPPDDRSGSHGTLSNPGQTVPPPDPSEKVPVIDSNTMG

SEQ ID NO: 60089 - protein, 274 aa, Homo sapiens
ARGINLLDYLPEILDGLFQILGDNGKEIRKMCEVVLGEFLKEIKKNPSSVKFAEMANILVIHCQTTDDLIQLTAMCWMREFIQLAGRVMLPYSSGILTAVLPCLAYDDRKKSIKEVANVCNQSLMKLVTPEDDELDELRPGQRQAEPTPDDALPKQEGTASGGPDGSCDSSFSSGISVFTAASTERAPVTLHLDGIVQVLNCHLSDTAIGMMTRIAVLKWLYHLYIKTPRKMFRHTDSLFPILLQTLSDESDEVILKDLEVLAEIASSPAGQNG

SEQ ID NO: 60090 - protein, 49 aa, Homo sapiens
LLEGKLTNRKDNHTKSPSVRHHHQRPKENYVMNAQASVADLINWKKGYQ

SEQ ID NO: 60091 - protein, 528 aa, Homo sapiens
  DOMAIN (462)..(503): kw TRANSCRIPTASE REVERSE II ORF2 domain identified by eMATRIX, accession number DM01354I, p-value=1.000e-40, raw score of 15.55
  DOMAIN (238)..(448): AP endonuclease family 1 domain identified by PFam, accession name AP_endonucleas1, E-value=8.7e-07, PFam score of -13.2
MYGNAWMPRQKFAVGVGSSWRTSARAMQKGNVGWEIPHRVPTGAPPSGAVRRGPPSSRPQNGRSTDSLHCVPGKAADTQHQPMKAAGREAVPCKATGLELPKTMETYLLHQCDLDGIAEQKAAETSADFPCLTALNSLTGRHPPVGGRLTPHTAGYPSETKLPEERSGSNICCSAIFTVWQPLLLTPRQTGSGVDLQQTPTDLQLRVLTVRRKTNKQKGHPHQNPICTSPSSKTKEKSLNDLMELKNMTQELRDECISFSSRFDQLGERVSVIEDQMNEMKPNLHRIGVSESDPESGTKLENTLQDIIQEKFPNLAKQANIQIQEIQRMPQRYSLRRATPRHIIVRFTKAEMKEKMLRAAREKDRSMRQKINKDIQELNSALHQADLIDIYRTLHSKSTEYTFFSAPHHTYSKTDHIVGSKALLGKCKRTEIVTNCLSDHSAIKLELRIKELTQNHSTTWKLNNLLLNDYWVHNEMKAEIKMFFETNKNKDTTYQNLWDTFKAVCRGKFIALNAHKRKQERSKINTLT

SEQ ID NO: 60092 - protein, 133 aa, Homo sapiens
  misc_feature (1)...(133): Xaa = X or * as defined in Table 2
LVFDDGDVQMGFWCGCPFCLLVFLLTVRSLSCRSVGVCWRSTRDLVCLGISSGGCRTVNIAEQQMLLPDCSSGIFVSEGYLAVXGVSLPLLGGASQLGLGSMAIFMILILPIHEHGMFFNLFVSSFILLSSCL

SEQ ID NO: 60093 - protein, 231 aa, Homo sapiens
MRHINTIDGTSSMMPIVVWEFRNRSSPRLHVRTFNQAACFINFIEACDLGNRIFSADILAAVPGSIGQELPGTIHDKRPRCSPELEYRPSRRRECGRGAATTLRAARTKGRRWQGTVTTGWRVITIRLRQHRGRLYWAGVSLQRRQIIRAGLEDHFMGKLRASLWAVTAVIPTTLTLPEPQRKPDDPARHRRLHYIMGMPLGDDIMLNYQPPHSTIPPLCVSYSTCPVTGV

SEQ ID NO: 60094 - protein, 91 aa, Homo sapiens
TAFICQLIYGFQSITALFTQQITGQRRDDDALLQQHRLDMADGARRVQPLRTYTDAVHDAVTAEYAECITQTVEAAVSLGITAINQETICR

SEQ ID NO: 60095 - protein, 278 aa, Homo sapiens
  DOMAIN (31)..(51): Phospholipase D Active site proteins motifs. domain identified by eMATRIX, accession number PF00614B, p-value=4.774e- 14, raw score of 14.45
MPIVRVGARLLYNYLVKGGVQVFEYRRRPLHGKVALMDDHWATVGSSNLDPLSLSLNLEANVIIHDRHFNQTLRDNLNGIIAADCQQVDETMLPKRTCTIHNSKELEPTQMSISNRLDKENVAHNTGSYVGYSKRLLLSAKKQRGRMGSSTELSRGFSLLCPNFENQIQGEGPRVLGKGPTSPNLAQNENNVGPPTCVLAHVTTQIEAIRRGAPGGLIFQSICGSEKGLKEFGVELAMLDEARAVGAEFNRIAGENCLYFETGQGSALSAGANFGADQ

SEQ ID NO: 60096 - protein, 152 aa, Homo sapiens
NAVKNANHRFFLRERLMKLKTTLFGNVYQFKDVKEVLAKANELRSGDVLAGVAAASSQERVAAKQVLSEMTVADIRNNPVIAYEDDCVTRLIQDDVNETAYNQIKNWSISELREYVLSDETSVDDIAFTRKGLTSEVVKKVAKICSNADLIP

SEQ ID NO: 60097 - protein, 143 aa, Homo sapiens
  misc_feature (1)...(143): Xaa = X or * as defined in Table 2
VPVALAAARRSELSRTAAADTGXSAAAELVNPPDYVPDERKRHQSGCPASNSARDPSSYNHAPDDARCRHRGSGFASIPGGRASRLPAPDADQNRLSLAPVLLQSPPERTELHAGGQSSWAPFEWEGAPRGEEWTLVSVGALK

SEQ ID NO: 60098 - protein, 426 aa, Homo sapiens
  DOMAIN (110)..(136): FAD-DEPENDENT PYRIDINE NUCLEOTIDE REDUCTASE SIGNATURE domain identified by eMATRIX, accession number PR00368C, p-value=1.750e- 12, raw score of 15.74
  DOMAIN (84)..(245): Pyridine nucleotide-disulphide oxidoreducta domain identified by PFam, accession name pyr_redox, E-value=2.4e-47, PFam score of 162.9
MGLFAFKLHHYSSERSKRRCDHSTLHTGVPGNNVCDSDRMSSCRKTSFRAPSDSTIWYDEYHPEEDLQHTASDFVAKVDDPKLANSEDCFVYRTIEDLNAIESCARRSKRGAVVGGGLLGLEAAGALKNLGIETHVIEFAPMLMAEQLDQMGGEQLRRKIESMGVRVHTSKNTLEIVQEGVEARKTMRFADGSELEVDFIVFSTGIRPRDKLATQCGLDVAPRGGIVINDSCQTSDPDIYAIGECASWNNRVFGLVAPGYKMAQVAVDHILGSENAFEGADLSAKLKLLGVDNNKPRIKPNKTNSGNRDWIQREPRGSNICRPAPNSSAKSERNFTWPTRSRNAQVHASRGVIAPYQAGERQAASGRPKARMRKSRTPRTATPRTKWSETMRSTEPAMEPDEMTHSAQKLVARNLTGFERPTKRGR

SEQ ID NO: 60099 - protein, 669 aa, Homo sapiens
  DOMAIN (401)..(440): Uroporphyrin-III C-methyltransferase proteins domain identified by eMATRIX, accession number BL00839B, p-value=9.500e- 35, raw score of 26.58
  DOMAIN (339)..(535): Tetrapyrrole (Corrin/Porphyrin) Methylas domain identified by PFam, accession name TP_methylase, E-value=1.3e-36, PFam score of 135.1
MDKFLGTYTLPRLNQEELESLNRPITGSEIEAIINSLPTKKTPGPDGFTAEFYQRYKEELASEAIGQSQSSAAKPRRSGKKSENLGPEFQGLWEWLPGNQRSELSSRGVSLWITSRSDSVAWCVRRITRRSDSVAWEWAGDYGDGYIVTLRQLTSGSDPIVRATTVDTASVTSHTPGCWWEYGEPRTGSAFSTPAGWRLQRRMTDALNQRVSEAAEARRIFCNVVDAPKAASFIMPSIIDRSPLMVAVSSGGTSPVLARLLREKLESLLPLHLGQVAKYAGQLRGRVKQQFATMGERRRFWEKLFVNDRLAQSLANNDQKAITETTEQLINEPLDHRGEVVLVGAGPGDAGLLTLKGLQQIQQADVVVYDRLVSDDIMNLVRRDADRVFVGKRAGYHCVPQEEINQILLREAQKGKRVVRLKGGDPFIFGRGGEELETLCNAGIPFSVVPAAYGKYGSAFQAIIPRLYPELLTFTGTAGDTELHFVRRTDAFVAVFQFHAEADAVANAVAAPGATHAGFRHTQCFRIGMTGFEAGFNQLTPDLRQIVFLCAKHRQTLGASDLGVEIKFTRDTTYRHQPFRGDFTARRTRDHRVGAVFLDVSEEVVVRILQRSMFRLQNVFVPAGGQQRTDGWFTNFTTVAFAVFRQQFFEGFNAFNADQMEQFLTRISK

SEQ ID NO: 60100 - protein, 70 aa, Homo sapiens
CAALIRPTGNELQQHRLDMADGARRVQPLRTYTDAVHDAVTAEYAECITQTVEAAVSLGITAINQETICR

SEQ ID NO: 60101 - protein, 113 aa, Homo sapiens
  misc_feature (1)...(113): Xaa = X or * as defined in Table 2
SNRLLKLMHSSRSSCVMFFSSIRSFKDFSLVFDDGDVQMGFWCGCPFCLLSFPFXQSGPSAARSVGVCWRSTPDPVCLGVSSRGCQTVNIAEQQMLLPDRSSGSFVSEGYPAV

SEQ ID NO: 60102 - protein, 143 aa, Homo sapiens
  misc_feature (1)...(143): Xaa = X or * as defined in Table 2
VPVALAAARRSELSRTAAADTGXSAAAELVNPPDYVPDERKRHQSGCPASNSARDPSSYNHAPDDARCRHRGSGFASIPGGRASRLPAPDADQNRLSLAPVLLQSPPERTELHAGRRSALGQLSEWQSGQSPAGAAIAAFDNR

SEQ ID NO: 60103 - protein, 1192 aa, Homo sapiens
  DOMAIN (640)..(682): BCCT family of transporters proteins domain identified by eMATRIX, accession number BL01303C, p-value=7.750e-35, raw score of 22.00
  DOMAIN (511)..(903): BCCT family transporter domain identified by PFam, accession name BCCT, E-value=1.1e-74, PFam score of 261.5
CGDRKMRLEFSIYRYNPDVDDAPRMQDYTLEADEGRDMMLLDALIQLKEKDPSLSFRRSCREGVCGSDGLNMNGKNGLACIPPISALNQPGKKIVIRPLPEHKQSDVEAGADLRAVRQFINPDRRLAATRVCWQDQGIRVFRQFDSVQHQLQQVTVVAGIAHQYRTEQGFVVFADNQAFVDLFTFVEVNVATCARRATVRITNTAYVYAQQFQLGAKVSTFKGVFATENMVNGDLRHFVARCYQTKYTVVPACAFTDGVDIRIGSLAGIINDNTPTRSNVQTTLGCQLIARTDTGREDDKVDFQFAAVGKTHGFTRFNTFLHNLKGVFAEGIAVRIWTLQKVIDNIHRAADRQKILLVCKTPADFLTLVKGGVPVNRINVGNMHYANGKQQIAKTVSVDAGDIAAFNDLKTAGFTAWADAGMLTLVEGPFDESLLDTCWLAIAATDDDALNQRVSEAAEARRIFCNVVDAPKAASFIMPSIIDRSPLMVAVSSGGTSPVLARLLREKLESLLPLHLGQVAKYAGQCALERISSECEPNWEEPPSRGRLTPHMAGYPSDLESSPTNLVADPVTQYMQPPEGAGQTIEPARQAMVWTLFHYGLTGWSMYALMGMALGYFSYRYNLPLTIRSALYPIFGKRINGPIGHSVDIAAVIGTIFGIATTLGIGVVQLNYGLSVLFDIPDSMAAKAALIALSVIIATISVTSGVDKGIRVLSELNVALALGLILFVLFMGDTSFLLNALVLNVGDYVNRFMGMTLNSFAFDRPVEWMNNWTLFFWAWWVAWSPFVGLFLARISPDIRNNPVIAYEDDCVTRLIQDDVNETAYNQIKNWSISELREYVLSDETSVDDIAFTRKGLTSEVVAAVAKICSNADLIYGAKKMPVIKKANTTIGIPGTFSARLQPNDTRDDVQSIAAQIYEGLSFGVGDAVIGVNPVTDDVENLSRVLDTIYGVIDKFNIPTQGCVLAHVTTQIEAIRRGAPGGLIFQSICGSEKGLKEFGVELAMLDEARAVGAEFNRIAGENCLYFETGQGSALSAGANFGADQVTMEARNYGLARHYDPFIVNTVVGFIGPEYLYNDRQIIRAGLEDHFMGKLSGISMGCDCCYTNHADADQNLNENLMILLATAGCNYIMGMPLGDDIMLNYQTTAFHDTATVRQLLNLRPSPEFERWLESMGIMANGRLTKRAGDPSLFF

SEQ ID NO: 60104 - protein, 410 aa, Homo sapiens
  DOMAIN (80)..(123): kw MANNOSE GUANYLYLTRANSFERASE ISOMERASE PYROPHOSPHORYLASE domain identified by eMATRIX, accession number DM01257H, p-value= 1.000e-40, raw score of 22.31
  DOMAIN (35)..(201): Mannose-6-phosphate isomerase domain identified by PFam, accession name MannoseP_isomer, E-value=1.4e-132, PFam score of 453.9
MDAGWSDVGSWSSLWEISAHTAEGNVCHGDVINHKTENSYVYAESGLVTTVGVKDLVVVQTKDAVLIADRNAVQDVKKVVEQIKADGRHEHRVHREVYRPWGKYDSIDAGDRYQVKRITVKPGEGLSVQMHHHRAEHWVVVAGTAKVTIDGDIKLLGENESIYIPLGATHCLENPGKIPLDLIEVRSGSYLEEDDVVRFADRYGRGNDMKKLTCFKAYDIRGKLGEELNEDIAWRIGRAYGEFLKPKTIVLGGDVRLTSETLKLALAKGLQDAGVDVLDIGMSGTEEIYFATFHLGVDGGIEVTASHNPMDYNGMKLVREGARPISGDTGLRDVQRLAEANDFPPVDETKRGRYQQINLRDAYVDHLFGYINVKNLTPLKLVINSGNGAAGPVVDAIEARFKALGAPVEL

SEQ ID NO: 60105 - protein, 466 aa, Homo sapiens; identical to SEQ ID NO: 39649
  DOMAIN (311)..(348): kw MANNOSE GUANYLYLTRANSFERASE ISOMERASE PYROPHOSPHORYLASE domain identified by eMATRIX, accession number DM01257F, p-value= 1.000e-40, raw score of 15.24
  DOMAIN (352)..(466): Mannose-6-phosphate isomerase domain identified by PFam, accession name MannoseP_isomer, E-value=1.2e-58, PFam score of 208.3

SEQ ID NO: 60106 - protein, 478 aa, Homo sapiens
  DOMAIN (114)..(129): Phosphoglucomutase and phosphomannomutase phosphoserine signa domain identified by eMATRIX, accession number BL00710, p-value= 2.707e-10, raw score of 12.98
  DOMAIN (25)..(465): Phosphoglucomutase/phosphomannomutase domain identified by PFam, accession name PGM_PMM, E-value=3.3e-225, PFam score of 761.6
ITTKIKLAASVRANYCLKKGNDMKKLTCFKAYDIRGKLGEELNEDIAWRIGRAYGEFLKPKTIVLGGDVRLTSETLKLALAKGLQDAGVDVLDIGMSGTEEIYFATFHLGVDCCIEVTASHNARDYNGMKLVREGARPISGDTGLRDVQRLAEANDFPPVDETKRGRYQQINLRDAYVDPMFGYINVRNLAPIKVVINSGNGTAGPVVHTIEDRFKALGAPVELIKVHNTPDANFPNGIPNPLLPECRDDTRNAVIKHGADMGIAFDGDFDRCFLFDEKGQFIEGYYIVGLLAEAFLEKNPGAKIIHDPRLSWNTVDVVTAAGGTPVMSKTGHAFIKERMRKEDAIYGGEMSAHHYFRDFAYCDSGMIPWLLVAELVCLKDKTLGELVRDRMAAFPASGEINSKLAQPVEAINRVEQHFSREALAVDRTDGISMTFADWRFNLRTSNTEPVVRLNVESRGDVPLMEARTRTLLTLLNE

SEQ ID NO: 60107 - protein, 175 aa, Homo sapiens
  misc_feature (1)...(175): Xaa = X or * as defined in Table 2
EPERTSIKSSGIFPGFSRQCVAPSGIXMDVVFTKQFDITINGDFCRSRDNHPVFRAVMVHLYRQALARFHGDAFHLVAVARVDRVIFAPRTIHFAMHPMLMATIGFDLLDHFFHILYRVTVGNQHRIFGLHHYQIFHPDGGDQARFSIHIAVFSFVINHIAVANVALGGVGADLP

SEQ ID NO: 60108 - protein, 685 aa, Homo sapiens
  DOMAIN (366)..(405): 5 kw NUCLEOSIDE TRANSPORT DEPENDENT NA domain identified by eMATRIX, accession number DM01857E, p-value=9.700e-37, raw score of 18.90
  DOMAIN (147)..(478): Na+ dependent nucleoside transporter domain identified by PFam, accession name Nucleoside_tra2, E-value=1e-128, PFam score of 441.0
MPVMPEMDVDVGGLGLQWTARCMNAHICWGALEAAAIFSPVIAPLAAASIKLFGGVSLERQIFKCDLRRLGCRAKNTCKQNPAQGSPSAMPLTGSQLVRPFRHNQFIIEPAMDAIPVPNCGKQLVAIHAIDKRFNDRRDLILPEENSSNRNKRFDFADVEGFLENAAKDANQQPHHANVVQQTDERSNENNRRKWGSSRKALNISKIESFVAVTTIFLGQNEIPAIVKPFIDRLNRNELFTAICSGMASIAGSTMIGYAALGVPVEYLLAASLMAIPGGILFARLLSPATESSQVSFNNLSFTETPPKSIIEAAATGAMTGLKIAAGVATVVMAFVAIIALINGIIGGVGGWFGFEHASLESILGYLLAPLAWVMGVDWSDANLAGSLIGQKLAINEFVAYLNFSPYLQTAGTLDAKTVAIISFALCGFANFGSIGVVVGAFSAVAPHRAPEIAQLGLRALAAATLSNLMSATIAGSVPHIMDLMRKGRIKGKGYILTEQEYCVVVGTINMDIRGMADIRYPQSASHPGTIHCSAGGVGRNIAHNLALLGRDVHLLSVIGDDFYGEMLLEETRRAGVNVSGCVRLHGQSTSTYLAIANRDDQTVLAINDTHLLEQLTPQLLNGSRDLLRHAGVVLADCNLTAEALEWVFTLADEIPVFVDTVSEFKAGKIKHWLAHWTLEDPSSV

SEQ ID NO: 60109 - protein, 682 aa, Homo sapiens
  DOMAIN (42)..(71): Thymidine and pyrimidine-nucleoside phosphorylases proteins domain identified by eMATRIX, accession number BL00647A, p-value= 1.360e-26, raw score of 20.57
  DOMAIN (41)..(176): glycosyl transferase family domain identified by PFam, accession name Glycos_transf_3, E-value=1.8e-42, PFam score of 154.5
MELGKGYDCSVRSPLEDPRHYRFGASSLLASLLKALGHGDEIIRKKRDGHALSDEEIRFFINGIRDNTISEGQIAALAMTIFFHDMTMPERVSLTMAMRDSGTVLDWKSLHLNGPIVDKHSTGGVGDVTSLMLGPMVAACGGYIPMISGRGLSHTGVAIISRSSDPRADVDYLFAQVIVHEQRVDTTPNCGNMLSGVGAFAIENGLIAATSPVTRVRIRNVNTGTFIEADVQTPNGVVEYEGSARIDGVPGTAAPVALTFLNAAGTKTGKVFPTDNQIDYFDDVPVTCIDMAMPVVIIPAEYLGKTGYELPAELDADKALLARIESIRLQAGKAMGLGDVSNMVIPKPVLISPAQKGGAINVRYFMPHSCHRALAITGAIAISSSCALEGTVTRQIVPSVGYGNINIERGSSRVDSPCKYSLINRVWVYITGVTDHHQNSQPQSMQRIAGTNVWQWTTQLNANWRGSYCFIPTERDDIFSVPSPDRLELREGWRKLLPQAIADPLNLQSWKGGRGHAVSALEMPQAPLQPGWDCPQAPEIPAKEIIWKSERLKKSRRVWIFTTGDATAEERPLAVLLDGEFWAQSMPVWPVLTSLNHRQQLSSAVYVLIDAFDTTHRAHELPCNADFWLAVQQELLPLVKAIAPFSDRADRTVVAGQSFGGLSALYAGLHWPERFGCVLSQS

SEQ ID NO: 60110 - protein, 431 aa, Homo sapiens
MERGGAQRGGAGLELHLLLGGRNWRAARAADGCEALGTECTAPTVNPNVNYVNKGSSVATNRPFWPPLELSKFGILDQAESVLIGCIVPDFLYVGYYVDSRGSPSGISDYSKGAGCKFNIQNGSTPVTNLCSGPEVKEILSIEVEAAVLPQLIQYAYLQSQHHMDATKIYNLRPLSSGPTCTWSCLSHSLAPEIPAKEIIWKSERLKKSRRVWIFTTGDATAEERPLAVLLDGEFWAQSMPVWPVLTSLTHRQQLPPAVYVLIDAIDTTHRAHELPCNADFWLAVQQELLPLVKAIAPFSDRADRTVVAGQSFGGLSALYAGLHWPERFGCVLSQSGSYWWPHRGGQQEGVLLEKLKAGEVSAEGLRIVLEAGIREPMIMRANQALYAQLHPIKESIFWRQVDGGHDALCWRGGLMQGLIDLWQPLFHDRS

SEQ ID NO: 60111 - protein, 340 aa, Homo sapiens
  DOMAIN (147)..(200): TonB dependent receptor C-terminal region domain identified by PFam, accession name TonB_boxC, E-value=6e-07, PFam score of 29.9
MTRTPNSKMKLGEEHEFCQEDRAICLYRVLVPPPGGNNFALAQSGSGNSANRTDFKPQKANTSEIGTKWQVLDKRLLLTAALFRTDIENEVEQNDDGTYSQYGKKRVEGYEISVAGNITPAWQVIGGYTQQKATIKNGKDVAQDGSSSLPYTPEHAFTLWSQYQATDDISVGAGARYIGSMHKGSDGANNETYGFHVDGAVRSHPQNGWMRTDLSATLFLSDPQSYDGGELVVNDTFGQHRVKLPAGDLVLYPSSSLHCVTPVTRGVRVASFMWIQSMIRDDKKRAMLFELDNNIQSLKSRYGESEEILSLLNLYHNLLREWCKCLLSTSCNKQGQRSSE

SEQ ID NO: 60112 - protein, 474 aa, Homo sapiens
  DOMAIN (280)..(319): DNA mismatch repair proteins mutS family proteins domain identified by eMATRIX, accession number BL00486B, p-value=2.038e- 29, raw score of 26.86
  DOMAIN (89)..(463): MutS family, N-terminal putative DNA bin domain identified by PFam, accession name MutS_N, E-value=8.6e-45, PFam score of 162.2
MRYFGSQCVCLSLGYRIHPDTPICWAKVQLSPSLFLCSYNLALKTSEALQTLVREDLGSGGVGWTLTSQQVVAQIEMVVYWFQALATAVIPQWQKDELRETLKSLKKVMDDLDRASKADVQKRNAANRGLKASEWVQQVSGLMDGKGGGKDVSAQATGKNVGCLQEALQLATSFAQLRLGDLKSQGKGAGGEDLIMLDIYAIEELRARGLEVTDDSPKYNYHLDSSGSYVRHQNRRYTMAALPHIRSITMEREQDSIIMDAATRRNLEITQNLAGGAENTLASVLDCTVTPMGSRMLKRWLHMPVRDTRVLLERQQTIGALQDFTAGLQPVLRQVGDLERILARLALRTARPRDLARMRHAFQQLPELRAQLETVDSAPVQALREKMGEFAELRDLLERAIIDTPPVLVRDGGVIASGYNEELDEWRALADGATDYLERLEVRERERTGLDTLKVGFNAVHGYYIQISRGGLFR

SEQ ID NO: 60113 - protein, 566 aa, Homo sapiens
  DOMAIN (31)..(70): DNA mismatch repair proteins mutS family proteins domain identified by eMATRIX, accession number BL00486B, p-value=2.038e- 29, raw score of 26.86
  DOMAIN (1)..(223): MutS family, N-terminal putative DNA binding domain identified by PFam, accession name MutS_N, E-value=0.036, PFam score of -189.4
MEREQDSIIMDAATRRNLEITQNLAGGAENTLASVLDCTVTPMGSRMLKRWLHMPVRDTRVLLERQQTIGALQDFTAGLQPVLRQVGDLERILARLALRTARPRDLARMRHAFQQLPELRAQLETVDSAPVQALREKMGEFAELRDLLERAIIDTPPVLSWMSGARWLTARPIICNYEVDRTIRHTKMNVGDVQRLSVAVVVNYKTLPDGKPLPLSNEQMKQIEDLTREAMGFSEKRGDSLNVVNSPFNSSDESGGELPFWQQQALLFVFAQADFHRIFHFLAGLRLLLYSFHRLSDRLRRLNQQERLPLSPGRAKNLLAHSQYAFLIQMWGAGPTFWRNCMMYHIPGVLSPQDVARFREQLEQPEWVDGRITTGAQGAQVKNNQQVDTRSTLYAALQNEVLNAVNQHALFFAAALPRTLSTPLFNRYQNNETYGFHVDGAVRSHPQNGWMRTDLSATLFLSDPQSYDGGELVVNDTFGQHRVKLPAGDLVLYPSSSLHCVTPVTRGVRVASFMWIQSMIRDDKKRAMLFELDNNIQSLKSRYGESEEILSLLNLYHNLLREWSEI

SEQ ID NO: 60114 - protein, 43 aa, Homo sapiens
  misc_feature (1)...(43): Xaa = X or * as defined in Table 2
YGDVEHESWLSCVRHAHPRIPFAXPTLISLQKRLGKWSGVTGA

SEQ ID NO: 60115 - protein, 58 aa, Homo sapiens
  misc_feature (1)...(58): Xaa = X or * as defined in Table 2
TFSDCQLRQQPGRNHHHFLWKGYGHHHYRNLPVPNGPPLSLLPXYCKAKFKPSTSQVP

SEQ ID NO: 60116 - protein, 72 aa, Homo sapiens
TPGERDVGGGFRRLPWRLDLPTGEAQHVGLFRRQRPDGAKSDGYRTGDVAAGRRFQIPSDAQQYLLDGMRYG

SEQ ID NO: 60117 - protein, 40 aa, Homo sapiens
  misc_feature (1)...(40): Xaa = X or * as defined in Table 2
LPTRCTYTNLTRRRSPPAWYYXXYWHRDICRSTPARRQTE

SEQ ID NO: 60118 - protein, 84 aa, Homo sapiens
  misc_feature (1)...(84): Xaa = X or * as defined in Table 2
MFGKELGRRDVSQLGAAEITYILKDXTXESXEILCGGRFLLPLRGRTLGQGEWPSLYFHSDCSSHAEQCLLYGFADWAPLAFFR

SEQ ID NO: 60119 - protein, 65 aa, Homo sapiens
ARTDTACSAPLNDTHRNVQQLSSFFSTIRFWRASGTNNCAASTATTAQSCRRSISSTSRLHPKHK

SEQ ID NO: 60120 - protein, 102 aa, Homo sapiens
  misc_feature (1)...(102): Xaa = X or * as defined in Table 2
LPSKLASGRCSFCDHWYXSQKSSHSGTLKSKKGQTLTAELGHLISFHLALLSQHLVXWQDRLQQRELHSDHWYFSRSSRGSLSPDIEGDLIQGQRHRDHIGP

SEQ ID NO: 60121 - protein, 84 aa, Homo sapiens
RCLYAVLVPELGLVLLKPGRESIQIFHNPRVLVEPEPKSMRNLPSGVVPAVRQPLAEDKTLLPFFSNERVIRAAGGVGALSDWQ

SEQ ID NO: 60122 - protein, 221 aa, Homo sapiens
  DOMAIN (54)..(138): HD domain identified by PFam, accession name HD, E-value= 0.002, PFam score of 22.3
NSTKASQAGRRVLLIDNGKKPGRKILRDPVESSDALFGVPAPAQVASGNRYGYSYLNDALNGGDAESAGLTPPELWPRHHGHGPAGVKLVEQLCQRLRVPNEIRDLARLVAEFHDLIHTFPMLNPKTIVKLFDSIDAWRKPQRVEQLALTSEADVRGRTGFESADYPQGRWLREAWEVAQSVPTKAVVEAGFKGVEIREELTRRRIAAVASWKEQRCPKPE

SEQ ID NO: 60123 - protein, 198 aa, Homo sapiens
VRAVFSLREQIRSHEIRRSAAVSNHQHFRRACGHIDRRTVQTLAHLTFRFGDKGVTRPEDFVHFWHRFRTKGDPLLTFWPSAPVTATILRIPLANGFFRHDHKSSCMTRVPQVPEDPVKSHAPQQFWIHHGKWFAWYDVAIGIPGPFAGRSCVILLGDAVREVTRVSNAVPAKRYIGGSPRRGFINSCNMPGIISPGA

SEQ ID NO: 60124 - protein, 38 aa, Homo sapiens
SNLLPDVSLQEFVKAFYLKTNDQMVVVYLASLIRSVVA

SEQ ID NO: 60125 - protein, 1396 aa, Homo sapiens
  DOMAIN (1339)..(1364): PYRIDINE NUCLEOTIDE DISULPHIDE REDUCTASE CLASS-II SIGNATURE domain identified by eMATRIX, accession number PR00469F, p-value= 9.129e-22, raw score of 16.51
  DOMAIN (1025)..(1109): Phosphoglycerate mutase family domain identified by PFam, accession name PGAM, E-value=3e-32, PFam score of 120.5
MGPDDGTRGGQRGTRKKTNERRESKEERKERQKEKEKKIAGYDGGTGASPLSSVKYAGCPWELGLVETQQALVANGLRHKIRLQVDGGLKTGVDIIKAAILGAESFGFGTGPMVALGCKYLRICHLNNCATGVATQDDKLRKNHYHGLPFKVTNYFEFIARETRELMAQLGVTRLVDLIGRTDLLKELDGFTAKQQKLALSKLLETAEPHPGKALYCTENNPPFDNGLLNAQLLQQAKPFVDERQSKTFWFDIRNTDRSVGASLSGYIAQSTAIKGWEPILSRGRLGEGYCTRIQSETHSESSQTSVQGNCFHESYRMTEEGGFRREVTAKTQPDITQPVRAVISELIFVIIMGFTFKRHIQSATDKTCSTVTGYQPLGFDYFPLPFCRFQVQGHFVILLTEGLQLAGKQAAHIRKTRHPFQHHRIDLRLNKGVTARPAKFIGHWLNISKTAAFRGEKTHRVPRRSVRQNIIDQADRLHGAQRLVINTNRTRVVDQLIEFLHHQHVNAHLAEIVRHHQPNRAGTSDRHLNAMVNSRLDVRQFQPENETSAAWVVGIDQTLVDIEAKVDDEFIERYGLSAGHSLVIEDDVAEALYQELKQKNLITHQFAGGTIGNTMHNYSVLADDRSVLLGVMCSNIEIGSYAYRYLCNTSSRTDLNYLQGVDGPIGRCFTLIGESGERTFAISPGHMNQLRAESIPEDVIGRTSALVLNSYLVPCQPGQAGRRVLLIDNGKKPGRKILMSGGGRCNFTNLYVEPGAYLSQNPHFCKSALARFTQWDFIDLVNKHGIAWHEKTLGQLFCDDSAQQIVDMLVDECEKGNVTFRLRSEVLSVAKDETGFTLDLNGMTVGCEKLVIATGGLSMPGLGASPFGYKIAEQFGLNVLPTRAGLVPFTLHKPLLEELQVLAGVAVPSVITAENGTVFRENLLFTHRGLSGPAVLQISSYWPPGGFVSSICSGCGLETSELAGLFRYTALDGNGCNMAGSFAEDLVKCLQNGLNFSGIGGRTDNLVHNQHYSAKLTVSPDKVYLVRHGETQWNAERRIQGQSDSPLTAKGEQQAMQVATRAKELGITHIISSDLGRTRRTRKSSPRPCGCDIISDSRLRELNMGVLEQQTLSEVTLPWNPGRTNRNGSAAVMDRDGRILRGHGDSATVMGLNVMGVRHVRKRERVWSGRMTLTEIVAKIDTGAEKRAAEELNKRDAYDVLIVGSGPAGAAAAIYSARKGIRTGLMGERFGGQILDTVDIENYISVPKTEGQKLAGALKVHVDEYDVDVIDSQSASKLIPAAVEGGLHQIETASGAVLKARSIIVATGAKWRNMNVPGEDQYRTKGVTYCPHCDGPLFKGKRVAVIGGGNSGVEAAIDLAGIVEHVTLLEFAPEMKADHVLRGQTAQAEKRPPYF

SEQ ID NO: 60126 - protein, 49 aa, Homo sapiens
VAGQRSVLSRHGKKITRVRQVGHHRTNPACKWPVQSSALYRQASLWGCL

SEQ ID NO: 60127 - protein, 418 aa, Homo sapiens
  DOMAIN (17)..(56): SYNTHETASE LIGASE PROTEIN ALANYL domain identified by eMATRIX, accession number PD01168K, p-value=1.783e-17, raw score of 17.79
  DOMAIN (106)..(326): 3' exoribonuclease family domain identified by PFam, accession name RNase_PH, E-value=6.2e-17, PFam score of 69.7
MKCDPPAKGCQGLFHYGLCVLPFRHLRNSSHAGAFVIVTEEAIAKGIRRIVAVTGAEAQKVSRPVDRKALGEGFARQNRHAWDHRRIPGPEESQPPKLYASDEEEAPGTRDPTRLRPVYARAGLLSQAKGSAYLEAGGTKVLCAVSGPRQAEGGERGGGPAGAGGEAPAALRGRLLCDFRRAPFAGRRRRAPPGGCEERELALALQEALEPAVRLGRYPRAQLEVSALLLEDGGSALAAALTAAALALADAGVEMYDLVVGCGLSLAPGPAPTWLLDPTRLEEERAAAGLTVALMPVLNQVAGLLGSGEGGLTESWAEAVRLGLEGCQRLYPVLQQSLRRHSPCPHCACYPRLTQGPGKEEYFVLVKDFPPLSTISLAKTPEMEISVGYANGIRVMSMTHTGEPGFMLYIPIENHRET

SEQ ID NO: 60128 - protein, 101 aa, Homo sapiens
  misc_feature (1)...(101): Xaa = X or * as defined in Table 2
RKKPLPXQRDISSSSLLSLRAFWASAPVTATNPPDTLGNGFFRHDHKSSCMTRVPQVRSPTELNRSQGASRPRGVIQQLGHRDPNGDDSHRVRIGLIKHMP

SEQ ID NO: 60129 - protein, 771 aa, Homo sapiens; identical to SEQ ID NO: 39311
  DOMAIN (88)..(127): SYNTHETASE LIGASE PROTEIN ALANYL domain identified by eMATRIX, accession number PD01168K, p-value=1.783e-17, raw score of 17.79
  DOMAIN (96)..(131): tRNA synthetases class II (A) domain identified by PFam, accession name tRNA-synt_2c, E-value=9e-16, PFam score of 56.6

SEQ ID NO: 60130 - protein, 895 aa, Homo sapiens
  DOMAIN (499)..(518): Domain of unknown function domain identified by eMATRIX, accession number PF00990B, p-value=5.800e-22, raw score of 12.15
  DOMAIN (455)..(618): Domain of unknown function DUF9 domain identified by PFam, accession name DUF9, E-value=9.7e-70, PFam score of 245.1
LSFLAPLWLTPAPRVITLSPANIELAFAAGITPVGVSSYSDYPPQAQKIEQVSTWQGMNLERIVALKPDLVIAWRGGLILGYEQGVSLPLLKKIIPDLKFTAAFGRGRYVCQRNLTALASTEPTQQDLLAFLEDELTPNNQEEQKRCAKLKGDLDTYKWDGLRDHTDIAIDDDLWRRLSTDKASCLNRNCYYYRECPFFVARREIQEAEVVVANHALVMAAMESEAVLPDPKNLLLVLDEGHHLPDVARDALEMSAEITAPWYRLQLDLFTKLVATCMEQFRPKTIPPLAIPERLNAHCEELYELIASLSNNRNLQAAISQEEVLVGWAFVWPHLAWQIASRAVDPLSREIYNLKTDAVLAGMWVGVMGVNVLPSTAMLMIMCLNLMGAGGPRLFVAGLVLMVVSCLVTLELTGITVSFNSAPLEWWLSLPIIVIYPLLFGWVSYQTATKLAEHKRRLQVMSTRDGMTGVYNRRHWETMLRNEFDNCRRHNRDATLLIIDIDHFKSINDTWGHDVGDEAIVALTRQLQITLRGSDVIGRFGGDEFAVIMSGTPAESAITAMLRVHEGLNTLRLPNTPQVTLRISVGVAPLNPQMSHYREWLKSADLALYKAKKARRSCSVPMTGEELPATLTPGQQGFYTFDDFTMSVTPELTLANIRALFNPANYDIILRTLTMAVAVTIASAILAFPMAWYMARYTSGKMKAFFYIAVMLPMWASYIVKAYAWTLLLAKDGVAQWFLQHLGLEPLLTAFLTLPAVGGNTLSTSGLGRFLVFLYIWLPFMILPVQAALERLPPSLLQASADLGARPRQTFRYVVLPLAIPGIAAGSIFTFSLTLGDFIVPQLVGPPGYFIGNMVYSQQGAIGNMPMAAAFTLVPIILIALYLAFVKRLGAFDAL

SEQ ID NO: 60131 - protein, 312 aa, Homo sapiens
MTIDGINSNDIYMLGYVSNSLTGPYKPLNKTGLVLQMGLDPNDVTFTYSHFAVPQAKGNNVVITSYMTNRGFFEDKKATFAPSFLMNIKGNKTSVVKNSILEQGQLTWLQVAKRAGLGGGQSGRTVLRERVRIEIASTHIALAARHSDWRCCRNGRYPGCDNLKTCHTSHGSVMAETAVINHKKRKNSPRIVQSNDLTEAAYSLSRDQKRMLYLFVDQIRKSDGTLQEHDGICEIHVAKYAEIFGLTSAEASKDIRQAPQSFAGKEVVFYRPEEDAGGILYPKTGIHAPYGRGNQYSKIFPARVYLKKMMPN

SEQ ID NO: 60132 - protein, 322 aa, Homo sapiens
  DOMAIN (215)..(244): kw REPLICATION REPB REPA INITIATION domain identified by eMATRIX, accession number DM00653A, p-value=7.207e-27, raw score of 20.40
  DOMAIN (199)..(311): Initiator RepB protein domain identified by PFam, accession name RepB_protein, E-value=1.1e-07, PFam score of 29.7
MHLFFPLPLRIWLLTGLNAGGFSAATEETHWALSSWVLSYRVFTFTASQLEFTKCCRKGPKPETKHAQSRGSPETAVINHKKRKNSPRIVQSNDLTEAAYSLSRDQKRMLYLFVDQIRKSDGTLQEHDGICEIHVAKYAEIFGLTSAEASKDIRQALKSFAGKEVVFYRPEEDAGDEKGYESFPWFIKRAHSPSRGLYSVHINPYLIPFFIGLQNRFTQFRLSETKEITNPYAMRLYESLCQYRKPDGSGIVSLKIDWIIERYQLPQSYQRMPDFRRRFLQVCVNEINSRTPMRLSYIEKKKGRQTTHIVFSFRDITSMTTN

SEQ ID NO: 60133 - protein, 225 aa, Homo sapiens; identical to SEQ ID NO: 47590
  DOMAIN (159)..(192): ESICULAR LUMEN DOMAIN domain identified by eMATRIX, accession number DM01292C, p-value=4.672e-09, raw score of 12.45

SEQ ID NO: 60134 - protein, 264 aa, Homo sapiens
  DOMAIN (75)..(190): ParA family ATPase domain identified by PFam, accession name ParA, E-value=0.001, PFam score of 7.7
MAETAVINHKKRKNSPRIVQSNDLTEAAYSLSRDQKRMLYLFVDQIRKSDGTLQEHDGICEIHVAKYAPIFGLTSAEASKDIRQALKSFAGKEVVFYRPEEDAGDEKGYESFPWFIKPRLTLGIGPINVVCAADVLIVPTPVELFDYPSALQFFDMLRDLLKNVDLKGFEPDVRILLTKYSNSNGSQSPWMEEQIRDAWGSMVLKNVVRETDEVGKGQIRMRTVFEQAIDQRSSTGAWRNALSIWEPVCNEIFDRLIKPRWEIR

SEQ ID NO: 60135 - protein, 309 aa, Homo sapiens; identical to SEQ ID NO: 46110

SEQ ID NO: 60136 - protein, 323 aa, Homo sapiens
  DOMAIN (263)..(310): kw TRANSCRIPTASE REVERSE II ORF2 domain identified by eMATRIX, accession number DM01354V, p-value=1.000e-40, raw score of 12.97
  DOMAIN (4)..(276): Reverse transcriptase domain identified by PFam, accession name rvt, E-value=6e-06, PFam score of 14.8
CDNLKTCHTSHGSVMAETAVINHKKRKNSPRIVQSNDLTEAAYSLSRDQKRMLYLFVDQIRKSDGTLQEHDGICEIHVAKYAEIFGLTSAEASKDIRQALKSFAAKESVFYRPEEDAGDEKSYESFPWFIKRAHSPSRGLYSVHINPYLIPFFIGLQDPVTQFRLSETKEITNPVGSSGQGNQAGEEIKGIQFGKEEVKLSLFADDMIVYLENPIVSAQNLLKLISNFSKVSGYKINVQKSQAFLYTNNRQTESQIMSELPFTIASKRIKYLGIQLTRDVKDLFKENYKPLLNEIKEDTNKWKNIPCSWVGRINIVKMAILPK

SEQ ID NO: 60137 - protein, 140 aa, Homo sapiens
MAETAVINHKKRKNSPRIVQSNDLTEAAYSLSRDQKRMLYLFVDQIRKSDGTLQEHDGICEIHVAKYAEIFGLTSAEASKDIRQALKSFAGKEVVFYRPEEDAGDEKGYESFPWFIKLPQAKGNKVGYPKLHANQRLFRE

SEQ ID NO: 60138 - protein, 183 aa, Homo sapiens
MAETAVINHKKRKNSPRIVQSNDLTEAAYSLSRDQKRMLYLFVDQIRKSDGTLQEHDGICEIHVAKYAEIFGLTSAEASKDIRQALKSFAGKEVVFYRPEEDAGDEKGYESFPWFIKLGKPVVPAALMNRPTRGERRFAYWAPGWFFFSPVRRATADCPSPPGPERVAASGPRWFAPAGENPV

SEQ ID NO: 60139 - protein, 150 aa, Homo sapiens
MAETAVINHKKRKNSPRIVQSNDLTEAAYSLSRDQKRMLYLFVDQIRKSDGTLQEHDGICEIHVAKYAEIFGLTSAEASKDIRQALKSFAGKEVVFYRPEEDAGDEKGYESFPWFIKQLQQAVHAGLPQQAKILFDGGSEIGKIPYKSKE

SEQ ID NO: 60140 - protein, 202 aa, Homo sapiens
MAETAVINHKKRKNSPRIVQSNDLTEAAYSLSRDQKRMLYLFVDQIRKSDGTLQEHDGICEIHVAKYAEIFGLTSAEASKDIRQALKSFAGKEVVFYRPEEDAGDEKGYESFPWFIKRAHSPSRGLYSVHINPYLIPFFIGLQNRFTQFRLSETKEITNPSGLMRSQQNSMRLSYLEKKKAREDSYRISFRINLHEKDPRGI

SEQ ID NO: 60141 - protein, 241 aa, Homo sapiens
MARGNAITLPVCGRDVKFTLEVLRGDSVEKTSRVWSGNERDQELLTEDALDDLIPSFLLTGQQTPAFGRRVSGVIECDNLKTCHTSHGSVMAETAVINHKKRKNSPRIVQSNDLTEAAYSLSRDQKRMLYLFVDQIRKSDGTLQEHDGICEIHVAKYAEIFGLTSAEASKDIRQALKSFAGKEVVFYRPEEDAGDEKGYESFPWFIKRAHSPSRGLYSVHINPYLIPFFIGLQNRFTQFRL

SEQ ID NO: 60142 - protein, 257 aa, Homo sapiens
  DOMAIN (144)..(173): kw REPLICATION REPB REPA INITIATION domain identified by eMATRIX, accession number DM00653A, p-value=4.732e-21, raw score of 20.40
  DOMAIN (128)..(171): Initiator RepB protein domain identified by PFam, accession name RepB_protein, E-value=0.036, PFam score of 10.1
MAETAVINHKKRKNSPRIVQSNDLTEAAYSLSRDQKRMLYLFVDQIRKSDGTLQEHDGICEIHVAKYAEIFGLTSAEASKDIRQALKSFAGKEVVFYRPEEDAGDEKGYESFPWFIKRAHSPSRGLYSVHINPYLIPFFIGVQNRFTQFRLSETKEITNPYAMRLYESLCIGLVMPVLPGLLRDIVHSDSIASHYGVLLALYALMQFLCAPVLGALSDRFGRRPVLLASLLGATIDYAIMATTPVLWIYPLVNSPSC

SEQ ID NO: 60143 - protein, 497 aa, Homo sapiens; identical to SEQ ID NO: 43796
  DOMAIN (79)..(121): Chloramphenicol acetyltransferase proteins domain identified by eMATRIX, accession number BL00100C, p-value=1.000e-39, raw score of 23.60
  DOMAIN (6)..(209): Chloramphenicol acetyltransferase domain identified by PFam, accession name CAT, E-value=7.3e-153, PFam score of 521.2

SEQ ID NO: 60144 - protein, 595 aa, Homo sapiens; identical to SEQ ID NO: 35573
  DOMAIN (232)..(261): kw REPLICATION REPB REPA INITIATION domain identified by eMATRIX, accession number DM00653A, p-value=7.207e-27, raw score of 20.40
  DOMAIN (410)..(535): ParA family ATPase domain identified by PFam, accession name ParA, E-value=1.7e-22, PFam score of 88.2

SEQ ID NO: 60145 - protein, 577 aa, Homo sapiens; identical to SEQ ID NO: 35575
  DOMAIN (410)..(439): kw REPLICATION REPB REPA INITIATION domain identified by eMATRIX, accession number DM00653A, p-value=7.207e-27, raw score of 20.40
  DOMAIN (394)..(436): Initiator RepB protein domain identified by PFam, accession name RepB_protein, E-value=0.0091, PFam score of 12.3

SEQ ID NO: 60146 - protein, 1114 aa, Homo sapiens; identical to SEQ ID NO: 35577
  DOMAIN (574)..(603): kw REPLICATION REPB REPA INITIATION domain identified by eMATRIX, accession number DM00653A, p-value=7.207e-27, raw score of 20.40
  DOMAIN (805)..(919): ParA family ATPase domain identified by PFam, accession name ParA, E-value=1.6e-27, PFam score of 104.9
  misc_feature (1)...(1114): Xaa = X or * as defined in Table 2

SEQ ID NO: 60147 - protein, 653 aa, Homo sapiens; identical to SEQ ID NO: 35578
  DOMAIN (293)..(336): 1 kw MIND INHIBITOR DIVISION CONTROL domain identified by eMATRIX, accession number DM01756B, p-value=4.822e-15, raw score of 22.91
  DOMAIN (258)..(363): ParA family ATPase domain identified by PFam, accession name ParA, E-value=7.4e-26, PFam score of 99.3

SEQ ID NO: 60148 - protein, 434 aa, Homo sapiens; identical to SEQ ID NO: 35581
  DOMAIN (405)..(434): kw REPLICATION REPB REPA INITIATION domain identified by eMATRIX, accession number DM00653A, p-value=7.000e-18, raw score of 20.40

SEQ ID NO: 60149 - protein, 519 aa, Homo sapiens; identical to SEQ ID NO: 35584
  DOMAIN (388)..(417): kw REPLICATION REPB REPA INITIATION domain identified by eMATRIX, accession number DM00653A, p-value=7.207e-27, raw score of 20.40
  DOMAIN (372)..(414): Initiator RepB protein domain identified by PFam, accession name RepB_protein, E-value=0.0091, PFam score of 12.3

SEQ ID NO: 60150 - protein, 753 aa, Homo sapiens; identical to SEQ ID NO: 35585
  DOMAIN (582)..(611): kw REPLICATION REPB REPA INITIATION domain identified by eMATRIX, accession number DM00653A, p-value=7.207e-27, raw score of 20.40
  DOMAIN (237)..(351): ParA family ATPase domain identified by PFam, accession name ParA, E-value=1.3e-08, PFam score of 42.0

SEQ ID NO: 60151 - protein, 653 aa, Homo sapiens; identical to SEQ ID NO: 34387
  DOMAIN (313)..(327): Phage integrase family domain identified by eMATRIX, accession number PF00589B, p-value=1.621e-11, raw score of 16.17
  DOMAIN (163)..(359): "Phage" integrase family domain identified by PFam, accession name Phage_integrase, E-value=9.3e-13, PFam score of 55.8

SEQ ID NO: 60152 - protein, 759 aa, Homo sapiens; identical to SEQ ID NO: 56227
  DOMAIN (178)..(207): kw REPLICATION REPB REPA INITIATION domain identified by eMATRIX, accession number DM00653A, p-value=7.207e-27, raw score of 20.40
  DOMAIN (458)..(759): General diffusion Gram-negative porins domain identified by PFam, accession name Gram-ve_porins, E-value=3.6e-193, PFam score of 633.8

SEQ ID NO: 60153 - protein, 806 aa, Homo sapiens; identical to SEQ ID NO: 35586

SEQ ID NO: 60154 - protein, 676 aa, Homo sapiens; identical to SEQ ID NO: 35588

SEQ ID NO: 60155 - protein, 550 aa, Homo sapiens; identical to SEQ ID NO: 35589
  DOMAIN (301)..(330): kw REPLICATION REPB REPA INITIATION domain identified by eMATRIX, accession number DM00653A, p-value=7.207e-27, raw score of 20.40
  DOMAIN (438)..(547): ParA family ATPase domain identified by PFam, accession name ParA, E-value=2.1e-21, PFam score of 84.6

SEQ ID NO: 60156 - protein, 390 aa, Homo sapiens
  DOMAIN (144)..(173): kw REPLICATION REPB REPA INITIATION domain identified by eMATRIX, accession number DM00653A, p-value=7.207e-27, raw score of 20.40
  DOMAIN (128)..(240): Initiator RepB protein domain identified by PFam, accession name RepB_protein, E-value=1.3e-06, PFam score of 25.8
MAETAVINHKKRRGGPRIEQSNDLTEAAYSLSRDQKRMLYLFVDQIRKSDGTLQEHDGICEIHVAKCAEIFGLTSAEASKDIRQALKSFAGKEVVFYRPEEDAGDEKGYESFPWFIKRAHSPSRGLYSVHINPYLIPFFIGLQNRFTQFRLSETKEITNPYAMRLYESLCQYRKPDGSGIVSLKIDWIIERYQLPQSYQRMPDFRRRFLQVCVNEINSRTPMRLSYIEKKKGRQTTHIFFDMLRDLLKNVDLKGFEPDVRILLTKYSNSNGSQSPWMEEQIRDAWGSMVLKNVVRETDEVGKAAPMVDSLIARVGVMARGNAITLPVCGRDVKFTLEVLRGDSVEKTSRVWSGNERDQELLTEDALDDLIPSFLLTGQQTPAFGRRYLVS

SEQ ID NO: 60157 - protein, 482 aa, Homo sapiens; identical to SEQ ID NO: 35590
  DOMAIN (375)..(404): kw REPLICATION REPB REPA INITIATION domain identified by eMATRIX, accession number DM00653A, p-value=7.207e-27, raw score of 20.40
  DOMAIN (194)..(471): Initiator RepB protein domain identified by PFam, accession name RepB_protein, E-value=4.6e-11, PFam score of 41.6

SEQ ID NO: 60158 - protein, 397 aa, Homo sapiens
  DOMAIN (240)..(267): Mrp family proteins domain identified by eMATRIX, accession number BL01215A, p-value=1.214e-11, raw score of 9.75
MAETAVINHKKRKNSPRIVQSNDLTEAAYSLSRDQKRMLYLFADHIRKSDGTLHEHDGICEIHVAKYAEIFGLTSAEASKDIRQALKSFAGKEVVFYRPEEDAGDEKGYESFPWFIKQYHCGQLDLLLAYDVRTTMQSILTVVPTECGRIRALSTNSNVLFNDDSPEARKITRRWRIGEAADLVGVSSHAIIDAEKAGRLPHPDMEIRGRVEQRVGYTIEQINHMRDVFGTRLRRAEDVFPPVIGVAAHKGGVYKTSVSVHLAHDLALKGLRVLLVEDPQHFTRCINTAKLPKSVVALFSHPGELSARSGDALQKAFTDEEELLKQQASNLHEQKKAGVIFEAEEDITLLTSVLKTSSASRTSLSSRHQFAPGATVLCKGDKMVLNLDRSRVPTECV

SEQ ID NO: 60159 - protein, 624 aa, Homo sapiens; identical to SEQ ID NO: 35592
  DOMAIN (468)..(497): kw REPLICATION REPB REPA INITIATION domain identified by eMATRIX, accession number DM00653A, p-value=7.207e-27, raw score of 20.40
  DOMAIN (452)..(494): Initiator RepB protein domain identified by PFam, accession name RepB_protein, E-value=0.0091, PFam score of 12.3

SEQ ID NO: 60160 - protein, 458 aa, Homo sapiens; identical to SEQ ID NO: 35596
  DOMAIN (326)..(355): kw REPLICATION REPB REPA INITIATION domain identified by eMATRIX, accession number DM00653A, p-value=7.207e-27, raw score of 20.40
  DOMAIN (310)..(352): Initiator RepB protein domain identified by PFam, accession name RepB_protein, E-value=0.0091, PFam score of 12.3
  misc_feature (1)...(458): Xaa = X or * as defined in Table 2

SEQ ID NO: 60161 - protein, 225 aa, Homo sapiens; identical to SEQ ID NO: 35598
  DOMAIN (158)..(187): kw REPLICATION REPB REPA INITIATION domain identified by eMATRIX, accession number DM00653A, p-value=1.000e-13, raw score of 20.40
  misc_feature (1)...(225): Xaa = X or * as defined in Table 2

SEQ ID NO: 60162 - protein, 439 aa, Homo sapiens; identical to SEQ ID NO: 35599
  DOMAIN (144)..(173): kw REPLICATION REPB REPA INITIATION domain identified by eMATRIX, accession number DM00653A, p-value=7.750e-25, raw score of 20.40
  DOMAIN (299)..(413): ParA family ATPase domain identified by PFam, accession name ParA, E-value=2.7e-28, PFam score of 107.5
  misc_feature (1)...(439): Xaa = X or * as defined in Table 2

SEQ ID NO: 60163 - protein, 40 aa, Homo sapiens
MRPAGGNENDLNMPSRTIETFVRCYLEAERIMSAVDRTPY

SEQ ID NO: 60164 - protein, 65 aa, Homo sapiens
  misc_feature (1)...(65): Xaa = X or * as defined in Table 2
MMWSVLLQXXXXXXXXXXXXXXXXXXXXQGTALIYSAYTRCLKKLPLGLSTYPRGYFYKYFFYRF

SEQ ID NO: 60165 - protein, 122 aa, Homo sapiens
MAETAVINHKKRKNSPRIVQSNDLTEAAYSLSRDQKRMLYLFVDQIRKSDGTLQEHDGICEIHVAKYAEIFGLTSAEASKDIRQALKSFAGKEVVFYRPEEDAGDEKGYESFPWFIKRIYSR

SEQ ID NO: 60166 - protein, 135 aa, Homo sapiens
MAETAVINHKKRKNSPRIVQSNDLTEAAYSLSRDQKRMLYLFVDQIRKSDGTLQEHDGICEIHVAKYAEIFGLTSAEASKDIRQALKSFAGKEVVFYRPEKDAGDEKGYESFPWFIKHSTNITSLSLWFFSSCTH

SEQ ID NO: 60167 - protein, 271 aa, Homo sapiens; identical to SEQ ID NO: 39307

SEQ ID NO: 60168 - protein, 225 aa, Homo sapiens
  DOMAIN (147)..(176): kw REPLICATION REPB REPA INITIATION domain identified by eMATRIX, accession number DM00653A, p-value=7.207e-27, raw score of 20.40
  DOMAIN (132)..(174): Initiator RepB protein domain identified by PFam, accession name RepB_protein, E-value=0.0091, PFam score of 12.3
GSVMAETAVINHKKRKNSPRIVQSNDLTEAAYSLSRDQKRMLYLFVDQIRKSDGTLQEHDGICEIHVAKYAEIFGLTSAEASKDIRQALKSFAGKEVVFYRPEEDAGDEKGYESFPWFIKRAHSPSRGLYSVHINPYLIPFFIGLQNRFTQFRLSETKEITNPYAMRLYESLCQYRYSFPPDYFHGLALNVCGFSRYTVQDVGGSIILGSGGQWLSSHSSSRQCP

SEQ ID NO: 60169 - protein, 219 aa, Homo sapiens
KPDLQQLDSHCDNLKTCHTSHGSVMAETAVINHKKRKNSPRIVQSNDLTEAAYSLSRDQKRMLYLFVDQIRKSDGTLQEHDGICEIHVAKYAEIFGLTSAEASMDIRQALKSFAGKEVVFYRPEEDAGDEKSYESFPWFIKPCFSFNSQAPLLQGCCGLLGIHSRAYSPGSLPPLEVLPVYAAEQQRSVACSFLWDVYLMRSTDLMTAGMLLYKVSGDP

SEQ ID NO: 60170 - protein, 34 aa, Homo sapiens
  misc_feature (1)...(34): Xaa = X or * as defined in Table 2
MGQGRNPQTRRTYGCQFRMVKXHGIEMKCEELIL

SEQ ID NO: 60171 - protein, 214 aa, Homo sapiens
MAETAVINHKKRKNSPRIVQSNDLTEAAYSLSRDQKRMLYLFVDQIRKSDGTLQEHDGICEIHVAKYAEIFGLTSAEASKDIRQALKSFAGKEVVFYRPEEDAGDEKGYESFPWFIKRPRCSASRHPDPKKLDGVMVPGVDHRRDSRCSAIGRHRARSPIADSSPKRNRHSSRECRMQRKTGSHYHFWQNSTPCRVSTTFSFAVRTDDRHLGCT

SEQ ID NO: 60172 - protein, 357 aa, Homo sapiens
DTGNNEWKQQEGLSHNNWLGLGCLFGPETPIFYPATLGHTSSIYYERKKEDKNGMKEEHDTSVAMFFTLFNFQISVENIRKGPMVVGESIAQSYLNVVQEIFRSRNHQLLQDLTRDLCDNLKTCHTSHGSVMAETAVINHKKRKNSPRIVQSNDLTEAAYSLSRDQKRMLYLFVDQIRKSDGTLQEHDGICEIHVAKYAEIFGLTSAEASKDIRQALKSFAGKEVVFYRPEEDAGDEKGYESFPWFIKQRSNLGVRLYACCGLLLCPAYPQHFAHGYVDKIPGYPGRAGTLTGLHPMQVCRCRRQAPCMKSNNALIVILGTVTLDAVGIGLVMPVLPGLLRDIVHFRQHRQSLWRAC

SEQ ID NO: 60173 - protein, 389 aa, Homo sapiens; identical to SEQ ID NO: 35594
  DOMAIN (287)..(316): kw REPLICATION REPB REPA INITIATION domain identified by eMATRIX, accession number DM00653A, p-value=7.207e-27, raw score of 20.40
  DOMAIN (271)..(313): Initiator RepB protein domain identified by PFam, accession name RepB_protein, E-value=0.0091, PFam score of 12.3

SEQ ID NO: 60174 - protein, 564 aa, Homo sapiens
  DOMAIN (261)..(290): kw REPLICATION REPB REPA INITIATION domain identified by eMATRIX, accession number DM00653A, p-value=7.207e-27, raw score of 20.40
  DOMAIN (245)..(287): Initiator RepB protein domain identified by PFam, accession name RepB_protein, E-value=0.0091, PFam score of 12.3
MEYALRPPREKNGGHAGSIPPHTPPKPKLQPGRQAPRPVVPSPPAGRGRHNPPNPARGKFQFRTGERKERTKSGEPAKRKNTGERGPTPDGEPPKNAQEETRPARPGGGAAGPGRICQAETAVINHKKRKNSPRIVQSNDLTEAAYSLSRDQKRMLYLFVAQIRKSDGTLQEHDGICEIHVAKYAEIFGLTSAEASKDIRQALKSFAGKEVVFYRPEEDAGDEKGYESFPWFIKRAHSPSRGLYSVHINPYLIPFFIGLQNRFTQFRLSETKEITNPYAMRLYESLCQYRKPDGSGIVSLKIDWIIERYQLPQSYQRMPDFRRRFLQRLVFLAAFVVYLETETLVTREAVTEILGKIADGSRRRKAAALTESDYRVLVGELDDEQMAALSRLGNDYRPTSAYERGQRYASRLQNEFAGNISALADAENISRKIITRCINTAKLPKSVVALFSHPGELSARSGDALQKAFTDKEELLKQQASNLHEQKKAGVIFEAEEVITLLTSVLKTSSASRTSLSSRHQFAPGATVLYKGDKMVLNLDRSRVPTECIEKIEAILKELEKPAP

SEQ ID NO: 60175 - protein, 596 aa, Homo sapiens; identical to SEQ ID NO: 35591
  DOMAIN (394)..(423): kw REPLICATION REPB REPA INITIATION domain identified by eMATRIX, accession number DM00653A, p-value=3.854e-21, raw score of 20.40
  DOMAIN (378)..(420): Initiator RepB protein domain identified by PFam, accession name RepB_protein, E-value=0.016, PFam score of 11.4

SEQ ID NO: 60176 - protein, 320 aa, Homo sapiens
  DOMAIN (226)..(255): kw REPLICATION REPB REPA INITIATION domain identified by eMATRIX, accession number DM00653A, p-value=7.207e-27, raw score of 20.40
  DOMAIN (210)..(252): Initiator RepB protein domain identified by PFam, accession name RepB_protein, E-value=0.0091, PFam score of 12.3
MKLMETLNQCINAGHEMTKAIAIAQFNDDSPEARKITRRWRIGEAADLVGVSSQAIRDAEKAGRLPHPCDNLKAWHTSHGSVMAETAVINHKKRKNSPRIVQSNDLTEAAYSLSRDQKRMLYLFVDQIRKSDGTLQEHDGICEIHVAKYAEIFGLTSAEASKDIRQALKSFAGKEVVFYRPEEDAGDEKGYESFPWFIKRAHSPSRGLYSVHINPYLIPFFIGLQNRFTQFRLSETKEITNPYAMRLYESLCQYLGKPVVPAALMNRPTRGERRFAYWAPGWFFFSPVRRATADCPSPPGPERVAASGPRWFAPAGENPV

SEQ ID NO: 60177 - protein, 461 aa, Homo sapiens
  DOMAIN (387)..(416): kw REPLICATION REPB REPA INITIATION domain identified by eMATRIX, accession number DM00653A, p-value=7.207e-27, raw score of 20.40
  DOMAIN (371)..(413): Initiator RepB protein domain identified by PFam, accession name RepB_protein, E-value=0.0091, PFam score of 12.3
MNQQNSQHFNLQPEHPTGVPAIVVPATFAEVVTVDSDTLASDAARLTCRHGLGNQDQGLYQREKDNGKCSIYSRRANYELAETIRTQSLDNIVVTKSGLRNLQTKRIPMVLCHQDPEFQAHSWMAIWADTKLAAGVFFIPQWHLECQRDRTIDSPGKGTEAREPSAVAQQISPSWSPARKELLILGLLKAVLSLNEASLHLAHTQVVLYLILPGHETRTWTYQMAGLKECDNLKTCHTSHGSVMAETAVINHKKRKNSPRIVQSNDLTEAAYSLSRDQKRMLYLFVDQIRKSDGTLQEHDGICEIHVAKYAEIFGLTSAEASKDIRQALKSFAGKEVVFYRPEEDAGDEKGYESFPWFIKRAHSPSRGLYSVHINPYLIPFFIGLQNRFTQFRLSETKEITNPYAMRLYESLCQYRTQDCVPSCDVSLLPTPPSHHEGVSIHNSSEHLHPLESLHHDTLAF

SEQ ID NO: 60178 - protein, 309 aa, Homo sapiens
  DOMAIN (278)..(307): kw REPLICATION REPB REPA INITIATION domain identified by eMATRIX, accession number DM00653A, p-value=4.086e-24, raw score of 20.40
  misc_feature (1)...(309): Xaa = X or * as defined in Table 2
MWLVTTELESTDTEHFYHHSKCYWPRAHLGECILSIEAACQAAGGEAGNGGSAVTKATLGSRQGAQHWKALARTIRQEKEIKGIQIGKQEVKLLPFADDMIIYLENSTDSSKKLSELCDNLKTCHTSHGSVMAETAVINHKKRKNSPRIVQSNDLTEAAYSLSRDQKRMLYLFVDQIRKSDGTLQEHDGICEIHVAKYAEIFGLTSAEASKDIRQALKSFAGKEVVFYRPEEDAGDEKGYESFPWFIKRAHSPFQRALYSCTICNPXILIPFSFIGLQNRFTQFRLSETKEITNPYALRLYQSLCQYRI

SEQ ID NO: 60179 - protein, 547 aa, Homo sapiens
  DOMAIN (213)..(242): kw REPLICATION REPB REPA INITIATION domain identified by eMATRIX, accession number DM00653A, p-value=7.207e-27, raw score of 20.40
  DOMAIN (197)..(239): Initiator RepB protein domain identified by PFam, accession name RepB_protein, E-value=0.0091, PFam score of 12.3
MGRRLSVLGATTSQDATATRMGYLYTSWVSFTSCLFNLNNFIYPKKSKRGTVPSKCDNLKTCHTSHGSVMAETAVINHKKRKNSPRIVQSNDLTEAAYSLSRDQKRMLYLFVDQIRKSDGTLQEHDGICEIHVAKYAEIFGLTSAEASKDIRQALKSFAGKEVVFYRPEEDAGDEKGYESFPWFIKRAHSPSRGLYSVHINPYLIPFFIGLQNRFTQFRLSETKEITNPYAMRLYESLCQYRKPDGSGIVSLKIDWIIERYQLPQSYQRMPDFRRRFLQVCVNEINSRTPMRGGSHTPTGFSTQGIINYFSFFAVAAARGGEAQNARKTQSLRGNNNRAYERQKSEKPRTKIVGILYSRLDSASRPFSSVCLFSVLTTKCPDPRRTPCAWHTGHQLGPATTHTAGKGAPTRPPLVQTARNKPNGQPRSTPHPHRVQKGGAHTNRTRPRKRGPTRRTPRRNRDATRATTQPTPPPGAAARSRTPPHTPPRQRNRRNAGATDATTSDGSPGEPGRARAHTNAPPRAATPRPGPKRPRERRKRKETRNVA

SEQ ID NO: 60180 - protein, 517 aa, Homo sapiens
  DOMAIN (120)..(158): Chloramphenicol acetyltransferase proteins domain identified by eMATRIX, accession number BL00100D, p-value=2.750e-33, raw score of 17.22
  DOMAIN (119)..(190): Chloramphenicol acetyltransferase domain identified by PFam, accession name CAT, E-value=8.7e-55, PFam score of 195.4
MAETAVINHKKRKNSPRIVQSNDLTEAAYSLSRDQKRMLYLFVDQIRKSDGTLQEHDGICEIHVAKYAEIFGLTSAEASKDIRQALKSFAGKEVVFYRPEEDAGDEKGYESFPWFIKRFIENMFFVSANPWVSFTSFDLNVANMDNFFAPVWTMGKYYTQGDKVLMPLAIQVHHAVCDGFHVGRMLNELQQYCDEWQGGADVTYAGAPTCWPELDIIPSCLALHRIETELMGKFDEGKLPTDPHLMLLLAIETVAHDYGGVVIDSAPNLGIGTMRVVCAADVLIVPTPAELFDYTSALQFFDMLRDLLKNVDLKGFEPDVRILLTKYSNSDGSQPPWIEEQIPDALGSMVLKNVQNTYIRLEPFKINVLEQITKHIEKLQCGGVVKQLSRRGNNQHISSTYDINRADTHNRFTQFRLSETKEITNPYAMRLYESLCQYRKPDGSGIVSLKIDWSIERYQLPQSYQRMPDFRRRFLQVCVNEINSRTPMRLSYIEKKKGRQTTHIVFSFRDITSMTTG

SEQ ID NO: 60181 - protein, 475 aa, Homo sapiens
  misc_feature (1)...(475): Xaa = X or * as defined in Table 2
XHTSLSRSPVTLTVTYYARHTSLSRSPVTLTVTYYARHTSLSRSPVTLTVTYYARHTSLSRSPVTLTVTYYARHTSLSRSPVTLTVTYYARHTSLSRSPVTLTVTYYARHTSLSRSPVTLTVTYYARHTIANIFGCQYAQNSNHFRNNISSFSNRDSISYSNILTPCQDVPGIVASPPPPFTRGSSRVNCGVMHLGKKSYMLGIDSVGIGAVKTDTVGTVPPTRDSKGSKCEAGRIWINRDFADFGTTIKQDFRLLGQTSVDRLLQLSQGQAVKGNQLLPVSLCDNLKTCHTSHGSVMAETAVINHKKRKNSPRIVQSNDLTEAAYSLSRDQKRMLYLFVDQIRKSDGTLQEHDGICEIHVAKYAEIFGLTSAEASKDIRQALKSFAGKEVVFYRPEEDAGDEKGYESFPWLSNELGVEVDSVENEDRTSCKCELLAPLSSHIKDQRDKACAFQMESGSKAQLRKHSWLSYPRVP

SEQ ID NO: 60182 - protein, 357 aa, Homo sapiens
  DOMAIN (250)..(279): kw REPLICATION REPB REPA INITIATION domain identified by eMATRIX, accession number DM00653A, p-value=9.289e-22, raw score of 20.40
  DOMAIN (234)..(346): Initiator RepB protein domain identified by PFam, accession name RepB_protein, E-value=1.1e-06, PFam score of 26.1
SSRAERWRRTYRCLGRTEKARIWEVTDRTVRTWIGEAVAAAAADGVTFSVPVTPHTFRHSYAMHMLYAGIPLKVLQSLMGHKSISSTEVYTKCDNLKTCHTSHGSVMAETAVINHKKRKNSPRIVQSNDLTEAAYSLSRDQKRMLYLFVDQIRKSDGTLQEHDGICEIHVAKYAEIFGLTSAEASKDIRQALKSFAGKEVVFYRPEEDAGDEKGYESFPWFIKRAHSPSRGLYSVHINPYLIPFFIGLQILFTQFRLSETKEITNPYAMRLYESLCQYRKPDGSGIVSLKIDWIIERYQLPQSYQRMPDFRRRFLQVCVNEINSRTPMRLSYIEKKKGRQTTHIVFSFRDITSMTTG

SEQ ID NO: 60183 - protein, 670 aa, Homo sapiens
  DOMAIN (266)..(295): kw REPLICATION REPB REPA INITIATION domain identified by eMATRIX, accession number DM00653A, p-value=7.207e-27, raw score of 20.40
  DOMAIN (250)..(525): Initiator RepB protein domain identified by PFam, accession name RepB_protein, E-value=3.3e-06, PFam score of 24.4
  misc_feature (1)...(670): Xaa = X or * as defined in Table 2
MVDSLIARVGVMARGNAITLPVCGRDVKFTLEVLRGDSVEKTSRVWSGNERDQELLTEDALDDLIPSFLLTGQQTPAFGQRVSGVIEIADWEVAVVKLLHFTEVIIXTFRRTPPCHTSHGSVMAETAVINHKKRKNSPRIVQSNDLTEAAYSLSRDQKRMLYLFVDQIRKSDGTLQEHDGICEIHVAKYAEIFGLTSAEASKDIRQALKSFAGKEVVFYRPEEDAGDEKGYESFPWFIKRAHSPSRGLYSVHINPYLIPFFIGLQNRFTQFRLSETKEITNPYAMRLYESLCQYPAPMVDSLIARVGVMARGNAITLPVCGRDVKFTLEVLRGDSVEKTSRCDNLKTCHTSHGSVMAETAVINHKKRKNSPRIVQSNDLTEAAYSLSRDQKRMLYLFVDQIRKSDGTLQEHDGICEIHVAKYAEIFGLTSAEASKDIRQALKSFAGKEVVFYRPEEDAGDEKGYESFPWFIKRAHSPSRGLYSVHINPYLIPFFIGLQNRFTQFRLSETKEITNPYAMRLYESLCQYHPLTIEKVMKPLITSNTVTDEIERANVFKMNGKWYLFTDSRGSKMTIDGINSNDIYMLGYVSNSLTGPYKPLNKTGLVLQMGLDPNDVTFTYSHFAVPQAKGNNVVITSYMTNRGFFEDKKATFAPSFLMNIKGNKTSDKLPH

SEQ ID NO: 60184 - protein, 320 aa, Homo sapiens
MGKDFMTETPKTMATKAKIDKWDLIKLKSFCTAKETTIRVNRQPTEWEKIFTTYSSDKGLISTIYNELKQIYKKKMNNPIKKWAKDMNRHFSKEDIYATNKHEKKCDNLKTCHTSHGSVMAETAVINHKKRKNSPRIVQSNDLTEAAYSLSRDQKRMLYLFVDQIRKSDGTLQEHDGICEIHVAKYAEIFGLTSAEASKDIRQALKSFAGKEVVFYRPEEDAGDEKGYESFPWFIKRAHSPSRGLYSVHINPYLIPFFIGLQNRFTQFRLSEGYPNPWKIPPFNISPRAMGKNNFEPFQSSCPMDPKTSRSKWDIPAFLK

SEQ ID NO: 60185 - protein, 288 aa, Homo sapiens
MIKAWLLLGQLVGDDSVARSQCQGMQRSTLVWGMTMSSIGCLWVSRSSQIDGLTAEKSGPEKPHGTCDNLKTCHTSHGSVMAETAVINHKKRKNSPRIVQSNDLTEAAYSLSRDQKRMLYLFVDQIRKSDGTLQEHDGICEIHVAKYAEIFGLTSAEASKDIRQALKSFAGKEVVFYRPEEDAGDEKGYESFPWFIKRSQSPRCEGTSAANQASLLPTFPFSQSEFDVGLLDTRQPIASLRRDQRSQSGVVATYSSYEHDSSQLHIDSHPRKSRYHESRSWQSVTLPY

SEQ ID NO: 60186 - protein, 304 aa, Homo sapiens
FLFSPLEMQIQRFTSPSPDIPYRASSSNCAPRGISPQELTVDLQTKCDNLKTCHTSHGSVMAETAVINHKKRKNSPRIVQSNDLTEAAYSLSRDQKRMLYLFVDQIRKSDGTLQEHDGICEIHVAKYAEIFGLTSAEASKDIRQALKSFAGKEVVFYRPEEDAGDEKGYESFPWFIKRAHSPSRGLYSVHINPYLNSLFYGVQNRFTQFRLNFVQKSRLVDLALKGLRVLLVEGNDPQGTASMYHGWVPDLHIHAEDTLLPFYLGEKDDVTYAIKPTCWPGLDIIPSCLALHRIETELMGKFDE

SEQ ID NO: 60187 - protein, 836 aa, Homo sapiens
  DOMAIN (156)..(189): ESICULAR LUMEN DOMAIN domain identified by eMATRIX, accession number DM01292C, p-value=4.672e-09, raw score of 12.45
  DOMAIN (358)..(644): Initiator RepB protein domain identified by PFam, accession name RepB_protein, E-value=0.036, PFam score of 10.2
  misc_feature (1)...(836): Xaa = X or * as defined in Table 2
MPASGNENDLNMPSGTIEIFVRCYVEVERIMDFADFGTTIKQDFRLLGQTSVDRLLQLSQGQAVKGNQLLPVSLVKRKTTLAPNTQTASPRALADSLMQLARQVSRLESGHQAPCMKSNNALIVILGTVTLDAVGIGLVMPVLPGLLRDIVHSDSIASHYGVLLALYALMQFLCAPVLGALSDRFGRRPVLLASLLGATIDYAIMATTPVLWIYPLCDNLKTCHTSHGSVMAETAVINHKKRKNSPRIVQSNDLTEAAYSLSRDQKRMLYLFVDQIRKSDGTLQEHDGICEIHVAKYAEIFGLTSAEASKDIRQALKSFAGKEVVFYRPEEDAGDEKGYESFPWFIKRAHSPSRGLYSVHINPYLIPFFIGLQNRFTQFRLSETKEITNPYAMRIPLHXLFRXTLRQTKPDNSAGKCVKIXXHTQNQRSGRSQNDFXRRPVLLASLLGATIDYAIMATTPVLWIYPLCDNLKTCHTSHGSVMAETAVINHKKRKNSPRIVQSNDLTEAAYSLSRDQKRMLYLFVDQIRKSDGTLQEHDGICEIHVAKYAEIFGLTSAEASKDIRQALKSFAGKEVVFYRPEEDAGDEKGYESFPWFIKRAHSPSRGLYSVHINPYLIPFFIGLQNRFTQFRLSETKEITNPYAMQSPYTDYSGKHYGKQSLTTAQVNVSKSDDTLKINGVEDHKTIFDGDGKTYQNVQQFIDEGNYTSGDNHTLRDPHYVEDKGHKYLVFEANTGTENGYQGEESLFNKAYYGGGTNFFRKESQKLQQSAKKRDAELANGALGIIELNNDYTLKKVMKPLITSNTVTDEIERANVFKMNGKWYLFTDSRGSKMTID

SEQ ID NO: 60188 - protein, 551 aa, Homo sapiens
  DOMAIN (144)..(173): kw REPLICATION REPB REPA INITIATION domain identified by eMATRIX, accession number DM00653A, p-value=7.207e-27, raw score of 20.40
  DOMAIN (128)..(388): Initiator RepB protein domain identified by PFam, accession name RepB_protein, E-value=3.3e-06, PFam score of 24.4
MAGTAVINHKKRKNSPRIVQSNDLTEAAYSLSRDQKRMLYLFVDQIRKSDGTLQEHDGICEIHVAKYAEIFGLTSAEASKDIRQALKSFAGKEVVFYRPEEDAGDEKGYESFPWFIKRAHSPSRGLYSVHINPYLIPFFIGLQNRFTQFRLSETKEITNPYAMRLYESLCQYLIRSLDYRVTVDSDTLASDAARLTCRHGLCNQCDNLKTCHTSHGSVMAETAVINHKKRKNSPRIVQSNDLTEAAYSLSRDQKRMLYLFVDQIRKSDGTLQEHDGICEIHVAKYAEIFGLTSAEASKDIRQALKSFAGKEVVFYRPEEDAGDEKGYESFPWFIKRAHSPSRGLYSVHINPYLIPFFIGLQNRFTQFRLSETKEITNPYAMRLYESLCQYRKPDGSGIVSLKIDWIIERYQLPQSYQRMPDFRRRFLQPWDLVPCIPPALAMAKRGQGTAQTVASEGASLKPWQLPHGVGPVGAQKTRIEVWRPLPRFQRVYALNKHQQQPHGGGHGPWVTPGGSCTDLEGLRLSWCSNAVNCADHRTAGITPPPTQGSQA

SEQ ID NO: 60189 - protein, 375 aa, Homo sapiens; identical to SEQ ID NO: 35570
  DOMAIN (322)..(351): kw REPLICATION REPB REPA INITIATION domain identified by eMATRIX, accession number DM00653A, p-value=4.553e-22, raw score of 20.40
  DOMAIN (306)..(345): Initiator RepB protein domain identified by PFam, accession name RepB_protein, E-value=0.012, PFam score of 11.9

SEQ ID NO: 60190 - protein, 301 aa, Homo sapiens
  DOMAIN (182)..(211): kw REPLICATION REPB REPA INITIATION domain identified by eMATRIX, accession number DM00653A, p-value=7.207e-27, raw score of 20.40
  DOMAIN (167)..(279): Initiator RepB protein domain identified by PFam, accession name RepB_protein, E-value=1.1e-07, PFam score of 29.7
PSKASELGRKQRRPVLSDSSYAQRKKKYPPWEKLQGSVRGETPVINHKERKNSPRIVQSNDFPEAAYSLSRDQKRMLYLFVAQIRKSDGTLQEHDGICEIHVAKYAEIFGLTSAEASKDIRQALKSFAGKEVVFYRPEEDAGDEKGYESFPWFIKRAHSPSRGLYSVHINPYLIPFFIGLQNRFTQFRLSETKEITNPYAMRLYESLCQYRKPDGSGIVSLKIDWIIERYQLPQSYQRMPDFRRRFLQVCVNEINSRTPMRLSYIEKKKGRQTTHIVFSFRDITSMGFFLESPTQGLASPE

SEQ ID NO: 60191 - protein, 435 aa, Homo sapiens
  DOMAIN (154)..(183): kw REPLICATION REPB REPA INITIATION domain identified by eMATRIX, accession number DM00653A, p-value=1.500e-23, raw score of 20.40
  DOMAIN (138)..(180): Initiator RepB protein domain identified by PFam, accession name RepB_protein, E-value=0.018, PFam score of 11.3
KLVTLHMDLSWQETAVINHKKRKSSPRIVQSNDLTEAAYSLSRDQKRMLYLFVDQIRKSDGTLQEHDGICEIHVAKYAEIFGLTSAEASKDIRQALKSFAGKEVVFYRPEEDAGDEKGYESFPWFIKRAHSPSRGLYSVHINPYLIPFFIGLQNRFTQFRLSETKEITIPYAMRLYESLCQYRKPDGSSIVSLKIDWIIERYQLPQSYQRMPDFRRRFLQTKAINTLYSKPTREQKTDTKAKNPLFNKAYYGGGTNFFRKESQKLQQSAKKRDAELANGALGIIELNNDYTLKKVMKPLITSNTVTDEIERANVFKMNGKWYLFTDSRGSKMTIDGINSNDIYMLGYVSNSLTGPYKPLNKTGLVLQMGLDPNDVTFTYSHFAMPQAKGNNVGITSYMTNKSFFQDKKATFAPSLLWTSKALNLRVKNSIREQDR

SEQ ID NO: 60192 - protein, 627 aa, Homo sapiens
  DOMAIN (542)..(575): ESICULAR LUMEN DOMAIN domain identified by eMATRIX, accession number DM01292C, p-value=4.672e-09, raw score of 12.45
  DOMAIN (238)..(280): Initiator RepB protein domain identified by PFam, accession name RepB_protein, E-value=0.0091, PFam score of 12.3
MDRESTKAVPTHNKNIWVKSEKVKHDDASVVDTEYKYSSSYNGGYLQINPFSFIFNVAYYSNVWLYHKCVHSAIDEHLDCLGVANFWLSTNSASMKCDNLKTCHTSHGSVMAETAVINHKKRKNSPRIVQSNDLTEAAYSLSRDQKRMLYLFVDQIRKSDGTLQEHDGICEIHVAKYAEIFGLTSAEASKDIRQALKSFAGKEVVFYRPEEDAGDEKGYESFPWFIKRAHSPSRGLYSVHINPYLIPFFIGLQNRFTQFRLSETKEITNPYAMRLYESLCQYRKPDGSGIVSLKIDWIIERYQLPQSYQRMPDFRRRFLQVCVNEINSRGSSRVPKQGCQVQCKENGAFTVLVDNYVKEEEGTGVVHQAPYFGAGEDPRNYTSGDNHTLRDPHYVEDKGHKYLVFEANTGTENGYQGEESLFNKAYYGGGTNFFRKESQKLQQSAKKRDAELANGALGIIELNNDYTLKKVMKPLITSNTVTDEIERANVFKMNGKCQAPCMKSNNALIVILGTVTLDAVGIGLVMPVLPGLLRDIVHSDSIASHYGVLLALYALMQFLCAPVLGALSDRFGRRTVLLASKLEATIDHAIRATTPVRACQQPVARPAEDTKRRTPPFKLRARALLQL

SEQ ID NO: 60193 - protein, 618 aa, Homo sapiens
  DOMAIN (156)..(203): kw TRANSCRIPTASE REVERSE II ORF2 domain identified by eMATRIX, accession number DM01354V, p-value=3.880e-35, raw score of 12.97
MPLRFSSSSRIPYYVNLLHKAATGFERIDYNFETHSSLEIATDALTISDHHPCESAAINAETRPSTVLEELARAIRQEKEIKGIQIGKEEVKLSLFADDMIMYLENPKDSSRKLLEWIKESNKVSGYKTHVHKSVALLYTNSDQVENQIRTQPFYNSCENKIKYLAIYLTKESKDLYKRNYKTLLKEITDDTNKWKHIPCSWIVKVAGVESWIHHTQVEVWTPPEETAGSTAHGSQDQPDQPRYTCEPLEDLHLLFQKETSHTIKASTTDPEEKPLPPYKRYCDNLKTCHTSHGSVMAETAVINHKKRKNSPRIVQSNDLTEAAYSLSRDLKRMLYLFVDHIRKSDGTLQEHDGICEIHVAKYAEIFGLTSAEASKDIRQALKSFAGKEVVFYRPEEDAGDEKGYESFPWFIKRAHSPSRGLYSVHINPYLIPFFIGLQNRFTQFRLSETKIPVIIQEAGLSQSEKQAADGIQGVAHPAFQVCDGCGSSLQHFFLLMLVDFQLPPLLNLRVLIMATLFTIACYVELRGYMLHAFQLVSLAMSHLHLAHNQDTHPAISDVLWVCALSHSLEFHRASDVRADLSNAYSEEVRKFGFLLWGLDCASLHRSDFITSSETKYH

SEQ ID NO: 60194 - protein, 314 aa, Homo sapiens
MLYLFVDQIRKSDGTLQEHDGICEIHGAKYAEIFGLTSTCSVPVFYTASHAFAAGTVHPEDSAVVHIQPIYSFPFFYRAKERALFDLRASLKPEENNTFAMPWVFIGCPACDNLKTCHTSHGSVMAETAVINHKKRKNSPRIVQSNDLTEAAYSLSRDQKRMLYLFVDQIRKSDGTLQEHDGICEIHVAKYAEIFGLTSAERSKDIRQALKSFAGKEVVFYRPEEDAGDEKGYESFPWFIKRAHSPSRGLYSVHINPYLIPFFIGLQNRFTQFRLSKQKRVSSRLNWESDKFDAHRSDPERSEARMVRFCNLYI

SEQ ID NO: 60195 - protein, 652 aa, Homo sapiens
  DOMAIN (317)..(346): kw REPLICATION REPB REPA INITIATION domain identified by eMATRIX, accession number DM00653A, p-value=7.207e-27, raw score of 20.40
  DOMAIN (301)..(343): Initiator RepB protein domain identified by PFam, accession name RepB_protein, E-value=0.0091, PFam score of 12.3
IPGTINVVCAADVLIVPTPAELFDYTSALQFFDMLRDLLKNVDLKGFEPDVRILLTKYSNSNGSQSPWMEEQIRDAWGSMVLKNVVRETDEVGKAAPMVDSLIARVGVMARGNAITLPVCGRDVKFTLEVLRGDSVEKTSRVWSARRIPENVKVGAGGLCDNLKTCHTSHGSVMAETAVINHKKRKNSPRIVQSNDLTEAAYSLSRDQKRMLYLFVDQIRKSDGTLQEHDGICEIHVAKYAEIFGLTSAEASKDIRQALKSFAGKEVVFYRPEEDAGDEKGYESFPWFIKRAHSPSRGLYSVHINPYLIPFFIGLQNRFTQFRLSETKEITNPYAMRLYESLCQYRKPDGSGIVSLKIDWIIERYQLPQSYQRVWTPGINCPEPCPGVWTPGINCPGAWGIHGPHGSAENTGPLHPGQTSAQLETSLLPSLRSARELELAQLSPRRKQNRSLQNIGVTPSLRVPWPKASNVQQFIDEGNYTSGDNHTLRDPHYVEDKGHKYLVFEANTGTENGYQGEESLFNKAYYGGGTNFFRKESQKLQQSAKKRDAELANGALGIIELNNDYTLKKVMKPLITSNTVTDEIERANVFKMNGKWYLFTDSRGSKMTIDVPQAKSNNVGITSYMTNRSFFEDKKPHLRQASYGTSKPLKLP

SEQ ID NO: 60196 - protein, 615 aa, Homo sapiens
  DOMAIN (250)..(279): kw REPLICATION REPB REPA INITIATION domain identified by eMATRIX, accession number DM00653A, p-value=7.207e-27, raw score of 20.40
  DOMAIN (234)..(596): Initiator RepB protein domain identified by PFam, accession name RepB_protein, E-value=2.4e-09, PFam score of 35.5
ETLTTLKTQAINTLCSKPTREQITDTKAKNLYLTKRTTGGGTNFFRIESQKLQQSAKKRDGNSYDHDYEFELGTPKPFIVEVTASQENKIDLCDNLKTCHTSHGSVMAETAVINHKKRKNSPRIVQSNDLTEAAYSLSRDQKRMLYLFVDQIRKSDGTLQEHDGICEIHVAKYAEIFGLTSAEASKDIRQALKSFAGKEVVFYRPEEDAGDEKGYESFPWFIKRAHSPSRGLYSVHINPYLIPFFIGLQNRFTQFRLSETKEITNPYAMRLYESLCQYRKPDGSGIVSLKIDWIIERYQLPQSYQRTPDFRRRFLQVCVNEINGAVIGIPCVSIRKPDGSGIVSIKIAWIIERYQPPQSYQRMPDFRRRFLQVCVNEINSRTPMRLSYIEKKKGRQTTHICDNLKTCHTSHGSVMAETAVINHKKRKNSPRIVQSNDLTEAAYSLSRDQKRMLYLFVDQIRKSDGTLQEHDGICEIHVAKYAEIFGLTSAEASKDIRQALKSFAGKEVVFYRPEEDAGDEKGYESFPWFIKRAHSPSRGLYSVHINPYLIPFFIGLQNRFTQFRLIETKEITNPYAMRLYKSLCQYLPQFDQSTIKNIESAKGLDVWDSWPLPKR

SEQ ID NO: 60197 - protein, 2183 aa, Homo sapiens
  DOMAIN (214)..(269): 2'-5'-oligoadenylate synthetases proteins domain identified by eMATRIX, accession number BL00832A, p-value=1.000e-40, raw score of 11.99
  DOMAIN (2015)..(2180): Integrase core domain identified by PFam, accession name rve, E-value=1.1e-33, PFam score of 120.4
  misc_feature (1)...(2183): Xaa = X or * as defined in Table 2
MAETAVINHKKRKNSPRIVQSNDLTEAAYSLSRDQKRMLYLFVDQIRKSDGTLQEHDGICEIHVAKYAEIFGLTSAEASKDIRQALKSFAGKEVVFYRPEEDAGDEKGYESFPWFIKRAHSPSRGLYSVHINPYLIPFFIGLQNRFTQFRLSETKEITNPYAMRLYESLCQYRKPDGSGIVSLKIDWIIERYQLPQIRLGDPGSSRLSMEHGLRSIPAWTLDKFIEDYLLPDTTFGADVKSAVNVVCDFLKERCFQGAAHPVRVSKVVKVVRCPKVKISSPEDQKPTCPWVLEEAYPMNSEPFTLPGALSEPSGDMGMLLYDSSLAHLKHHQKHAPSALTLDTSFPLDQTLLFLGLVLTFRSAMQWLPHAAPMVDSLIARVGVMARGNAITLPVCGRDVKFTLEVLRGDSVEKTSRVWSGNERDQELLTEDALDDLIPSFLLTGQQTPAFGRRVSGVIEIADGSRRRKAAALTESDYRVLVGELDDERAPCRPLSMLVLEKCDNLKTCHTSHGSVMAETAVINHKKRKNSPRIVQSNDLTEAAYSLSRDQKRMLYLFVDQIRKSDGTLQEHDGICEIHVAKYAEIFGLTSAEATNFLEALPRLPPPHERIQCFWEPVLICRVSAYLFAQPKGPQTLPPLSGRAGLGGTETLSLRPRKKVTGGATQAFAKENNQKAYKETYGVSHITRHDMLQIPKQQQNEKYQVPQFDQSTIKNIESAKGLDVWDSWPLQNADGTVAEYNGYHVVFALAGSPKDADDTSIYMFYQKVGDNSIDSWKNAGRVFKDSDKFDANDPILKDQTQEWSGSATFTSDGKIRLFYTDYSGKHYGKQSLTTAQVNVSKSDDTLKINGVEDHKTIFDGDGKTYQNVQQFIDEGNYTSGDNHTLRDPHYVEDKGHKYLVFEANTGTENGYQGEESLFNKAYYGGGTNFFRKESQKLQQSAKKRDAELANGALGIIELNNDYTLKKVMKPLITSNTVTDEIERANVFKMNGKWYLFTDSRGSKMTIDGHSYVNDEVKYAKANVDSYPFFKMGVVEREHVKGWVVGVRSASKCPPFSAAARDWCDNLKTCHTSHGSVMAETAVINHKKRKNSPRIVQSNDLTEAAYSLSRDQKRMLYLFVDQIRKSDGTLQEHDGICEIHVAKYAEIFGLTFAESNKDIRQALKSFAGKEVVFYRPEEDAGDEKGYESFPWFIKRAHSPSRGLYSVHINPYLIPFFIGLQNRFTQFRLSETKEITNPYAMRLYESLCQYRKPDGSGIVSLKIDWIIERYQLALRXQRMADFRRRFLRACVNEINSRTSMRLSYIEKKKGRQTTHIAIRDAEKAGRLPHPDMEIRGRVEQRVGYTIEQINHMRDVFGTRLRRAEDVFPPVIGVAAHKGGVYKTSVSVHLAQDLALKGLRVLLVEGNDPQGTASMYHGWVPDLHIHAEDTLLPFYLGEKDDVTYAIKPTCWPGLDIIPSCLALHRIETELMGKFDEGKLPTDPHLMLRLAIETVAHDYDVIVIDSAPNLGIGTINVVCAADVLIVPTPAELFDYTSALQFFDMLRDLLKNVDLKGFEPDVCKFHFIGDSECNLPLGHWGIAIGIGIGIGIGWQSVVLCGQQTTDKQPTSSSCSICKVLCPSNKMDWLSTSAEHMNSHAMHFPCLKANAVTNNNNNNNNTNNNNNNNNNELNSNRVLACKDCKDYLASQWETMDAERVPLEHRRYNIPSPMLTSSSPNGSRHGAMSINTPPSTPSISSSTPASTSIYCYLCGLHSDLTLARVLYASKEGSRPYFPLLLKHNSLRNAEQLRTIQPLVCTFCYHSMLNQWRKYEAQSPSVNPADRKYNWHDYNCHLCGITTYRKRVRALPVNEFPFVKHQKSDDGLLLENGEYAVVCLDCYESLSAPPRRRSLFHCIFIASFSLRQCLHEVGSAYLPEFGHGHFSQHEPDELGMIWPPASSSPLLIPDVPSPYTPCLSESCQRMVIVGYGRCFADRQNLMGMPAINAKRVYRIMRQNALLLERKPAVPPSKRAHTGRVAVKESNQRWCSDGFEFCCDNGERLRVTFALDCCDREALHWAVTTGGFNSETVQDVMLGAVERRFGNDLPSSPVEWLTDNGSCYRANETRQFARMLGLEPKNTAVRSPESNGIAESFVKTIKRDYISIMPKPDGLTAAKNLAEAFEHYNEWHPHSALGYRSPREYLRHGLVMG

SEQ ID NO: 60198 - protein, 276 aa, Homo sapiens
  DOMAIN (144)..(173): kw REPLICATION REPB REPA INITIATION domain identified by eMATRIX, accession number DM00653A, p-value=7.207e-27, raw score of 20.40
  DOMAIN (129)..(171): Initiator RepB protein domain identified by PFam, accession name RepB_protein, E-value=0.0091, PFam score of 12.3
  misc_feature (1)...(276): Xaa = X or * as defined in Table 2
MAETAVINHKKRKNSPRIVQSNDLTEAAYSLSRDQKRMLYLFVDQIRKSDGTLQEHDGICEIHVAKYAEIFGLTSAEASKDIRQALKSFAGKEVVFYRPEEDAGDEKGYESFPWFIKRAHSPSRGLYSVHINPYLIPFFIGLQNRFTQFRLSETKEITNPYAMRLYESLCQYRKPDGSGIVSLKIDWIIERYQLPKVPSPEARKITRRWRIVKQRIXLGFLLRLSEMPRKQGDYRTRIWKFEDGLSNVLVIQLNKLIICVMCLVRDCDVLKTYFHR

SEQ ID NO: 60199 - protein, 281 aa, Homo sapiens
  DOMAIN (174)..(203): kw REPLICATION REPB REPA INITIATION domain identified by eMATRIX, accession number DM00653A, p-value=1.000e-24, raw score of 20.40
  DOMAIN (231)..(273): Initiator RepB protein domain identified by PFam, accession name RepB_protein, E-value=0.00033, PFam score of 17.4
CDNLKTCHTSHGSVMAETAVINHKKRKNSPRIVQSNDLTEAAYSLSRDQKRMLYLFVDQIRKSDGTLQEHDGICEIHVAKYAEIFGLTSAEASKDIRQALKSFAGKEVVFYRPEEDAGDEKGYESFPWFIKRAHSPSRGLYSGHINPYLIPFFIGLQNRFTHFRFMEQKKSPSNRFTQVRLSETKEITNPYAMRLYESLCQYRKPDGSSIVSLKIDWIIERYQLPQSYQRMPDFRRRFLQVCVNEINSRTPMRLSYIEKKKGRQTTHIVFSFRDITSMTTG

SEQ ID NO: 60200 - protein, 417 aa, Homo sapiens
  DOMAIN (341)..(370): kw REPLICATION REPB REPA INITIATION domain identified by eMATRIX, accession number DM00653A, p-value=7.207e-27, raw score of 20.40
  DOMAIN (325)..(367): Initiator RepB protein domain identified by PFam, accession name RepB_protein, E-value=0.0091, PFam score of 12.3
QQHRNPQKGKQWSYKSTFKFKSESDIHLAEHHKQVLYDGKLASSIAFTYNAKATDAQLCLESSPKENASIFVHSPHALMLQILTEQVCTQVVHKPHPEPDSTVKIQNPSEQMAVLYCIVLVGGEFDLEMNFIIQDAESITCMTELLEHCDVTCQAEIWSMFTAILRKSVRNLQTSTEVGLIEQCDNLKTCHTSHGSVMAETAVINHKKRKNSPRIVQSNDLTEAAYSLSRDQKRMLYLFVDQIRKSDGTLQEHDGICEIHVAKYAEIFGLTSAEASKDIRQALKSFAGKEVVFYRPEEDAGDEKGYESFPWFIKRAHSPSRGLYSVHINPYLIPFFIGLQNRFTQFRLSETKEITNPYAMRLYESLCQYRKPDGLSIVSLKIDWIIERYQLPQSYQRMPDFRRRFLQDVQNETHGNT

SEQ ID NO: 60201 - protein, 2110 aa, Homo sapiens
  DOMAIN (157)..(187): kw TRANSCRIPTASE REVERSE II ORF2 domain identified by eMATRIX, accession number DM01354R, p-value=5.632e-21, raw score of 8.50
  DOMAIN (146)..(1643): "Phage" integrase family domain identified by PFam, accession name Phage_integrase, E-value=4e-47, PFam score of 170.0
RVSRGRKWFFIALKRMPAMKKAMNLFLGLSNVRTVHPEGFTVYISTHISFPFFIGLQNRFTQFRLSETKEITNPYAMRLYESLCQYRKPDGSSIVSLKIDWDHMSVFVSPLRPWWKGPQTVILTTPTAGWFNIRKSVNVIQHINRTKDKNRMIISPDAEKAFDKIQQHFMLKTLSKLDIDGNYMPPPAAYCVIRYALIEEHYCFIPGSAVCVNEINSRTPMRLSYIEKKKGRQTTHIVFIRDKLMERRNRRTGRTEKARIWEVTDRTVRTWIGEAVAAAAADGVTFSVPVTPHTFRHSYAMHMLYAGIPLKVLQSLMGHKSISSTEVYTKVFALDVAARHRPVYQSAFVLELVISITLTINSTMPAAEQPFCYPMVTVGWWGKTYYPILPTKNLRLRKKPKRYREVQKLAHSDTTGKLWSWELNPAVWFQGPPLAIHRKDATTPSTPISQGVTSPNPKKKNFPLQPKEVPPGFSGLWFPLLQQVNKANFDSFRKPTLHMDLSWSETAVINHKKRKNSPRIVQSNDLTEAAYSLSRDQKRMLYLFVDQIRKSDGTLQEHDGICEIHVAKYAEIFGLTSAEASKDIRQALKSFAGKEVVFYRPEEDAGDEKGYESFPWFIKRAHSPSRGLYSVHINPYLIPFFIGLQNRFTQFRLSETKEITNPYAMRLYESLCQYRKPDGSGIVFLKIDWIIERYQLPESYQRMPDFRRRFLQVCVNEINSRTPMRLSYIEKKKGRQTTHIVFIRDKLMERRNRRTGRTEKARIWEVTDRTVRTWIGEAVAAAAADGVTFSVPVTPHTFRHSYAMHMLYAGIPLKVLQSLMGHKSISSTEVYTKVFALDVAARHRPVYQSAFVLELVISITLTINSTMPAAEQPFCYPMVTVGWWGKTYYPILPTKNLRLRKKPKRYREVQKLAHSDTTGKLWSWELNPAVWFQGPPLAIHRKDATTPSTPISQGVTSPNPKKKNFPLQPKEVPPGFSGLWFPLLQQVNKANFDSFRKPTLHMDLSWSETAVINHKKRKNSPRIVQSNDLTEAAYSLSRDQKRMLYLFVDQIRKSDGTLQEHDGICEIHVAKYAEIFGLTSAEASKDIRQALKSFAGKEVVFYRPEEDAGDEKGYESFPWFIKRAHSPSRGLYSVHINPYLIPFFIGLQNRFTQFRLSETKEITNPYAMRLYESLCQYRKPDGSGIVFLKIDWIIERYQLPESYQRMPDFRRRFLQVCVNEINSRTPMRLSYIEKKKGRQTTHIDVQIETDGKLNQCINAGHEMTKAIAIAQFNDDSPEARKITRRWRIGEAADLVGVSSQAIRDAEKAGRLPHPDMEIRGRVEQRVGYTIEQINHMRDVFGTRLRRAEDVFPPVIGVAAHKGGVYKTSVSVHLAQDLALKGLRVLLVEGNDPQGTASMYHGWVPDLHIHAEDTLLPFYLGEKDDVTYAIKPTCWPGLDIIPSCLALHRIETELMGKFDEGKLPTDPHLMLRLAIETVAHDYDVIVIDSAPNLGIGTINVVCAADVLIVPTPAELFDYTSALQFFDMLRDLLKNVDLKGFEPDVFIRDKLMERRNRRTGRTEKARIWEVTDRTVRTWIGEAVAAAAADGVTFSVPVTPHTFRHSYAMHMLYAGIPLKVLQSLMGHKSISSTEVYTKVFALDVAARHRIRKSDGTLQEHDGICEIHVAKYAEIFGLTSAEASKDIRQALKSFAGKEVVFYRPEEDAGDEKGYESFPWFIKRAHSPSRGLYSVHINPYLIPFFIGLQNRFTQFRLSETKEITNPYAMRLYESLCQYRKPDGSGIVSLKIDWIIERYQLPQSYQRMPDFRRRFLQCCFADQDASAGSPKDVDDTSIYMFYQKVGDNSIDSWKNAGRVFKDSDKFDANDPILKDQTQEWSGSATFTSDGKIRLFYTDYSGKHYGKQSLTTAQIPKQQQTEKYQVPQFDQSTIKNIESAKGLDVWDSWPLQNADGTVAEYNGYHVVFALAGSPKDADDTSIYMFYQKVGDNSIDSWKNAGRVFKDSDKFDANDPILKDQTQEWSGSATFTSDGKIRLFYTDYSGKHYGKQSLTTAQVNVSKSDDTLTINGVEDHKTIFDGDGKTYQNVQQFIDEGNYTSGDNHTLRDPHYVEDIVP

SEQ ID NO: 60202 - protein, 731 aa, Homo sapiens
  DOMAIN (618)..(647): kw REPLICATION REPB REPA INITIATION domain identified by eMATRIX, accession number DM00653A, p-value=7.207e-27, raw score of 20.40
  DOMAIN (602)..(644): Initiator RepB protein domain identified by PFam, accession name RepB_protein, E-value=0.0091, PFam score of 12.3
RYLRDPCCLNMLKYFGLALWREASKDIRQALKSFAGKEVVFYRPEEDAGDEKGYESFPLVYQTCAQSIQRALQCTYQPISHSLLYRVTKPGLRQFRLIGNKENYPIRMAMPLIRNPWVNIRRPDGSGMRFSENRLDHKSVTSWLKVPTVCLTSAAASCRSVLMRSTAELQCASHTLRKRKAARRLISYFPSANPFLQRISESIREDRNGRSQKTVHTEGDMNMNIKKIVKQATVLTFTTALLAGGATQAFAKENNQKAYKETYGVSHITRHDMLQIPKQQQNEKYQVPQFDQSTIKNIESAKGLDVWDSWPLQNADGTVAEYNGYHVVFALAGSPKDADDTSIYMFYQKVGDNSIDSWENAGRVFKDSDKFDANDPDPEDQTQEWSGSATFTSDGKIRLCLGVADLAVDSRGSPCPSFLSPPNPQLPSPQGVDTGRRHLCPASTSELDAASWGTTALRLGCDNLKTCHTSHGSVMAETAVINHKKRKNSPRIVQSNDLTEAAYSLSRDQKRMLYLFVDQIRKSDGTLQEHDGICEIHVAKYAEIFGLTSAEASKDIRQALKSFAGKEVVFYRPEEDAGDEKGYESFPWFIKRAHSPSRGLYSVHINPYLIPFFIGLQNRFTQFRLSETKEITNPYAMRLYESLCQYHRKAGECLLHEYEDLVPIRDTLRLFPGGRYLPRAKHVAPSEPDPEQDEQKLRFCKRHLYGQQPRSPVEIRLQHVAIAYQTHHAYD

SEQ ID NO: 60203 - protein, 1606 aa, Homo sapiens
  DOMAIN (1047)..(1089): Chloramphenicol acetyltransferase proteins domain identified by eMATRIX, accession number BL00100C, p-value=5.345e-37, raw score of 23.60
  DOMAIN (1042)..(1177): Chloramphenicol acetyltransferase domain identified by PFam, accession name CAT, E-value=2.5e-101, PFam score of 350.0
MAHYVNHHQNQFFGVEVPRQKKIREDHKSYYAINTVYVYGQEKYLLRQKKIREDHKSYYAINTVYVYGQEKYLLCQLWKLLVMRLVQLQPRREMVPKLASGAAHPTAAAGVPGCAQRIEHLGLNVVLQLLVGVPLEMVHGATRIGLVYVAGVVAGRQCDNLKTCHTSHGSVMAETAVINHKKRKNSPRIVQSNDLTEAAYSLSRDQKRMLYLFVDQIRKSDGTLQEHDGICEIHVAKYAEIFGLTSAEASKDIRQALNSFAGKEVVFYRPEEDAGDEKGYESFPWFIKLLCWAQSMTMVPGLMELTSGDRSVKTVKKGAIIVILAPVLFRHYKYGDWSFGEAAPMVDSLIARVGVMARGNAITLPVCGRDVKFTLEVLRGDSVEKTSRVWSDTGVRSKSIWCHRNLPMGVPRVKPADLTDSDYSGSCLASWMMSQMDGIIPIWGNDYRPNNVLKERGSAFMQSRIAEMNFAWKKFSAPGLMLDNIFHLRTGQSADIVLLTALAIESGLQRIPIAIAQFNDDSPEARKITRRWRIGEAADLVGVSSQAIRDAEKAGRLPHPDMEIRGRVEQRVGYTIEQINHMRDVFGTRLRRAEDVFPPVIGVAAHKGGVYKTSVSVHLAQDLALKGLRVLLVEGNDPQGTASMYHGWVPDLHIHAEDTLLPFYLGEKDDVTYAIKPTCWPGLDIIPSCLALHRIETELMGKFDEGKLPTDAHLMLRLAIETVAHDYDVIVIDSAPNLGIGTINVWLQVAKRAGLGGGQSGRTVLRERVRIEIASTHIALAARHSDWRCCRNGRYPARGPAPKESLLMATTAPGPWRVLSGYHRYSLKAQGLFSQLMMNAARLESLSSGQQVPLWLREQKSTFKREACDQMTLIDEYESTISREAFHQDNGTMRMKEFWRLSGLLAYHRMILKEELWAPAEPQCSLCDTIARICSSHYNAGLLSCHSKWVCVNEINSRTPMRLSYMRKGISRPNRSLQLSLNVSALLGLAPELQPHPCSVYTASTAPGYFPRFRAVIIKLCNGDSLRHFMTSVYALVHRQSRSAMKDGELVIWDSVHPCYTVFHEQTETFSSLWSEHHDDFRQFLHIYSQDVACYGENLAYFPKGFIENMFFVSANPWVSFTSFDLNVANMDNFFAPVFTMGKYYTQGDKVLMPLAIQVHHAVCDGFHVGRMLNELQQYCDEWQGGAVTVDSDTLASDAARLTCRHGLCNQCDNLKTCHTSHGSVMAETAVINHKKRKNSPRIVQSNDLTEAAYSLSRDQKRMLYLFVDQIRKSDGTLQEHDGICEIHVAKYAEIFGLTSAEASKDIRQALKSFAGKEVVFYRPEEDAGDEKGYESFPWFIKPPGYFPRFRAVIIKLCNGDSLRHFMTSVYALIPDVLIVPTPAELFDYTSALQFFDMLRDLLKNVDLKGFEPDVRILLTKYSNSNGSQSPWMEEQIRDAWGSMVLKNVVRETDEVGKGQIRMRTVFEQAIDQRSSTGAWRNALSIWEPVCNEIFDRLIKGYRARIRNHGRTEKARIWEVTDRTVRTWIGEAVAAAAADGVTFSVPVTPHTFRHSYAMHMLYAGIPLKVLQSLMGHKSIMFNGSLHEGFCAGCGCPAPGAVCDAGV

SEQ ID NO: 60204 - protein, 924 aa, Homo sapiens
  DOMAIN (451)..(480): kw REPLICATION REPB REPA INITIATION domain identified by eMATRIX, accession number DM00653A, p-value=7.207e-27, raw score of 20.40
  DOMAIN (44)..(104): Chloramphenicol acetyltransferase domain identified by PFam, accession name CAT, E-value=2.2e-29, PFam score of 111.0
TSAEATKDIREPLKRFSGKEVVFYRPEEDAGDEKGYESFPWFIKQHFEAFQSVAQCTYNQTVQLDITAFLKTVKKNKHKFYPAFIHILARLMNAHPEFSMAMKDAPYEATKVVAADFAIRTPSTDFAVGNQLDACALLRAGGKAISCAVSWDFADFGTTHQTGFSPAGANQRGPLAATFSGPGGEGQSAVARLTGEKKNHPGAQYANRLSPRVGRFINAAGTTGFPTGKRAVSATQLIPVRGNRPQNQYFPTGSFPHGNKGSPIQDEIGVRPKNPNPYQSVKDIRRSSFMVIECDNLKTCHTSHGSVMAETAVINHKKRKNSPRIVQSNDLTEAAYSLSRDQKRMLYLFVDQIRKSDGTLQEHDGICEIHVAKYAEIFGLTSAEASKDIRQALKSFAGKEVVFYRPEEDAGDEKGYESFPWFIKRAHSPSRGLYSVHINPYLIPFFIGLQNRFTQFRLSETKEITNPYAMRLYESLCQYRKPDGSGIVSLKIDWIIERYQLPQSYQRMPDFRRRFLQSHGSVMAETAVINHKKRKNSPRIVQSNDLTEAAYSLSRDQKRMLYLFVDQIRKSDGTLQEHDGICEIHVAKYAEIFGLTSAEASKDIRQALKSFAGKEVVFYRPEEDAGDEKGYESFPWFIKRAHSPSRGLYSVHINPYLIPFFIGLQNRFTQFRLSETKEITNPYAMRLYESLCQYRKPDGSGIVSLKIDWIIERYQLPQSYQRMPDFRRRFLQHFLAHAGCPKGTQNFTFRMKFIIFSIKKVLPPVDTILAHDPVIHTCHLRESFGSVSPSSPKSNRLPCPEVILFHYGESWNLLRADQRLIFAKSWPRASRYQQGHQDLFILRSDLPSQVFIRDKLMERRNRRTGRTEKARIWGSDGQNGQDLDWGGGCRALLLTGWPFSCSGSPPLGSALSYARPMAVARYTR

SEQ ID NO: 60205 - protein, 132 aa, Homo sapiens
NSPCEFVSILTSTPQHTSIHITIKEIYLQVCITVMRSGSNNSLSNECVSGGKRIRIKVNITKLLTMAHHLRHKRKRRCPLLMKMHCNNVASKLSPAQCLSRSRSAIFWHWKQKTICLTHSFLPKPAARWMKV

SEQ ID NO: 60206 - protein, 69 aa, Homo sapiens
RQRRTCQRHIQFNLKGRRSQHQPANCRCIIMNPCGNQHCADALRDHYHLFQSNLAVAGSKTDKFIDIPH

SEQ ID NO: 60207 - protein, 165 aa, Homo sapiens
CQLTQGLADIIKAGGIRLLRLFISVELFLHDVLSGFIEQVFHQMRGFLQNAEAKSSCPSFDRVGSPKDGIQLFGIWHFRLQNQQMLLHVSQQFVRFIKKCLIKIAYIHAHAVTSVRLWCNLRFFQGAYWLILAFGVFMQNGLFGLFVQYQQADATVDGIIRSAIA

SEQ ID NO: 60208 - protein, 589 aa, Homo sapiens
  DOMAIN (355)..(380): Bacterial regulatory proteins deoR family proteins. domain identified by eMATRIX, accession number BL00894B, p-value=5.364e- 17, raw score of 17.92
  DOMAIN (56)..(376): Asparaginase domain identified by PFam, accession name Asparaginase, E-value=3.8e-41, PFam score of 150.1
RPHYFLRRLILFPLFRPIFRYPHSIRGAPPASRIYFCSFDIIHINIMQKKSIYVAYTGGTIGMQRSEQGYIPVSGHLQRQLALMPEFHRPEMPDFTIHEYTPLMDSSDMTPEDWQHIAEDIKAHYDDYDGFVILHGTDTMAYTASALSFMLENLGKPVIVTGSQIPLAELRSDGQINLLNALYVAANYPINEVTLFFNNRLYRGNRTTKAHQRCQRVGIRRIKAHMHVIDAKTELIAQYAGRTNVSGNHRFFDDTVGNATRLGDDIQHFTFFTENKAVIRAIFKHQLPVTGIFQPVRNLVIHQLCFGFDGGGKEFDIIFNGAISGERHAACQYRADFIGAHDDVETRMMSNYTLKRELAEFAASLVQPGETIFIENGSSNALLALEHIDSRGLKEKKMPTSHENALQQRCQQIVTSPVLSPEQKRHFLALEAENNLPYPQLPAEARRALDEGVICDMFEGHAPYKPRYVLPDYARFLANGSEWLELEGAKDLDDALSLLTILYHHVPSVTSMPVYLGPINERRIFQLIRADRTADMVQLRRLLTHAEPVLDWPLMARMLGLVGKARTPATSGRFCIDHKQKCVRKPLYV

SEQ ID NO: 60209 - protein, 727 aa, Homo sapiens
  DOMAIN (211)..(233): CYTOSOL AMINOPEPTIDASE SIGNATURE domain identified by eMATRIX, accession number PR00481B, p-value=4.764e-12, raw score of 13.85
  DOMAIN (2)..(300): Cytosol aminopeptidase family domain identified by PFam, accession name Peptidase_M17, E-value=1.5e-12, PFam score of -88.3
MNKFIKVALVGAVLATLTACTGHIENRDKNCSYDYLLHPAISISKIIGGCGPTAHASTKPRKIDGLGIKHVQLSGEGWDADRCWAFWQGYKAPKGTRKVVWPDLDDAQRQELDNRLMIIDWVRDTINAPAEELGPSQLAQRAVDLISNVAGDRVTYRITKGEDLRDKVIWGCTQSDAVQNVLRYCWRWITTQLAIKKRQCTRACIKQTAFMDSMKSDMGGAATVTGALAFAITRGLNKRVKLFLCFRPVLACRMTLSADGTIEDNIEFFAATIESKSKEWRHTHALVFKDRPDSRFIFGEKGEVLDIVAEPRRIANRIVEEAMIAVNICAARVLRDKLGLGIYNEHMGFDPANTDALAALLKTHGLHVDAEEVLTLDGFCKLRRELDAQPTGFLDSSIRRFQSFAEISTEPGPHFGLASYPIWIENVAWADTIRVQPNYPQLSRRNLHALSLNIFKDEGREAFLKLMETTDIFIEASKGPAFARRGITDEVLWQHNPKLVIAHLSGFGQYGTEEYTNLPAYNTIAQAFSGYLIQNGDVDQPMPAFPYTADYFSGLTATTAALAALHKVRETGKGESIDIAMYEVMLRMGQYFMMDYFNGGEMCPRMSKGKDPYYAGCGLYKCADGYIVMELQREQVMNNFNLHTPTRILFGKGAIAGLREQIPHDARVLITYGGRQREKNRRSRSSSGCPEGMDVLEFGGIEPNPASVNVVKIEAMREEMRDTSSIG

SEQ ID NO: 60210 - protein, 162 aa, Homo sapiens; identical to SEQ ID NO: 59341
  DOMAIN (2)..(155): Transposase domain identified by PFam, accession name Transposase_15, E-value=3e-44, PFam score of 160.4

SEQ ID NO: 60211 - protein, 42 aa, Homo sapiens
KAGKACGLGPPFPAVLSLASPLDLPSSSWLSPCCCSNAPSAL

SEQ ID NO: 60212 - protein, 270 aa, Homo sapiens; identical to SEQ ID NO: 59344
  DOMAIN (60)..(251): Transposase domain identified by PFam, accession name Transposase_15, E-value=7.7e-83, PFam score of 288.6

SEQ ID NO: 60213 - protein, 610 aa, Homo sapiens; identical to SEQ ID NO: 59345
  DOMAIN (340)..(547): Transposase domain identified by PFam, accession name Transposase_15, E-value=4.7e-05, PFam score of -14.2

SEQ ID NO: 60214 - protein, 278 aa, Homo sapiens; identical to SEQ ID NO: 59347
  DOMAIN (60)..(249): Transposase domain identified by PFam, accession name Transposase_15, E-value=1.5e-85, PFam score of 297.7

SEQ ID NO: 60215 - protein, 212 aa, Homo sapiens; identical to SEQ ID NO: 59349
  misc_feature (1)...(212): Xaa = X or * as defined in Table 2

SEQ ID NO: 60216 - protein, 57 aa, Homo sapiens; identical to SEQ ID NO: 59351
  misc_feature (1)...(57): Xaa = X or * as defined in Table 2

SEQ ID NO: 60217 - protein, 166 aa, Homo sapiens; identical to SEQ ID NO: 59354
  DOMAIN (15)..(61): RNA polymerase beta subunit domain identified by PFam, accession name RNA_pol_B, E-value=6.2e-36, PFam score of 130.6

SEQ ID NO: 60218 - protein, 73 aa, Homo sapiens; identical to SEQ ID NO: 59357
  misc_feature (1)...(73): Xaa = X or * as defined in Table 2

SEQ ID NO: 60219 - protein, 531 aa, Homo sapiens; identical to SEQ ID NO: 59361
  DOMAIN (60)..(241): Transposase domain identified by PFam, accession name Transposase_15, E-value=8.9e-91, PFam score of 315.0

SEQ ID NO: 60220 - protein, 29 aa, Homo sapiens
IWHSSRRKSRSISRRVWVTLHRLPLVRFR

SEQ ID NO: 60221 - protein, 42 aa, Homo sapiens
  misc_feature (1)...(42): Xaa = X or * as defined in Table 2
TILRITFQFCRSNRRRQRQXNRFSTSQRRCYFLLNGEDVTLP

SEQ ID NO: 60222 - protein, 513 aa, Homo sapiens
  misc_feature (1)...(513): Xaa = X or * as defined in Table 2
MPSYFTSRIAAVHVSALREEQAHHESKHHESFIAQRMFRMFYQARNLLHAGQENLFSGLTALTAEFTVGEEATRGKTTGKRGPSPDGRILRTTKTRNPRGYMQGRYLESQRDVEATDKPFEFFMNRFRLLEAAPRVEFIAYTGLCEDVIRPQLDEAIAQGYLTECADYWQITEHGKLFLNSLLELFLADGYHMWRMIGAGAHLAVGIDPTQLFLCQFEAVRKLLGNDQRAHLLPLGIEQLPALKAFDTVFSMGVLYHRRSPLEHLWQLKDQLVNEGELVLETLVIDGDENTVLVPGDRYAQMRNVYFIPSALALKNWLKKCGFVDIRIADVSVTTTEEQRRTEWMVTESLADFLDPHDPGKTVEGYPAPKRAVSDCAQAVKMTNMISYQGLVRTFLSTSPNNWLVFMQNGQEVVIDSGKSVSXRSVCFGCFIKHGICSMRDKKISFLVXRRLLLNSLSAKKLHGAKQRAKGDLPRMGAFCVPPKRVIRVVICKEGIWKASVMSKPQISRLSSL

SEQ ID NO: 60223 - protein, 94 aa, Homo sapiens; identical to SEQ ID NO: 59366
  DOMAIN (9)..(36): Protamine P1 proteins domain identified by eMATRIX, accession number BL00048, p-value=7.395e-10, raw score of 6.39
  misc_feature (1)...(94): Xaa = X or * as defined in Table 2

SEQ ID NO: 60224 - protein, 363 aa, Homo sapiens
  DOMAIN (36)..(239): Transposase domain identified by PFam, accession name Transposase_15, E-value=4e-121, PFam score of 415.8
FSRMEQILPWQNMTAVIEPFYPKAGNGRRPYPLETMLRIHCMQHWYNLSDGAMEDALYEIASMRLFARLSLDSALPDRTTIMNFRHLLEQHQLARQLFKTINRWLAEAGVMMTQGTLVDATIIEAPSSTKNKEQQRDPEMHQTKKGNQWHFGMKAHIGVDAKSGLTHSLVTTAANEHDLNQLGNLLHGEKQFVSADAGYQGAPQREELAEVDVDWLIAERPGKVKTLKQNPRKNKTAINIEYMKASIRARVEHPFRIIKRQFGFVKARYKGLLKNDSVCLTGSKDNVLLVIHHYGDSSVVIVRTDHLVIGKVFFFGIRVRHLLVFQFDVIGNTQRIHQGLDGFFLHIHEVVVTAILAAIGRLA

SEQ ID NO: 60225 - protein, 461 aa, Homo sapiens; identical to SEQ ID NO: 59369
  DOMAIN (143)..(333): Transposase domain identified by PFam, accession name Transposase_15, E-value=3.5e-86, PFam score of 299.7

SEQ ID NO: 60226 - protein, 459 aa, Homo sapiens; identical to SEQ ID NO: 59364
  DOMAIN (121)..(189): PTS HPr component phosphorylation sites domain identified by PFam, accession name PTS-HPr, E-value=0.00012, PFam score of 22.4

SEQ ID NO: 60227 - protein, 138 aa, Homo sapiens; identical to SEQ ID NO: 59370
  DOMAIN (54)..(66): Gamma-thionins family proteins domain identified by eMATRIX, accession number BL00940B, p-value=7.000e-09, raw score of 12.41
  misc_feature (1)...(138): Xaa = X or * as defined in Table 2

SEQ ID NO: 60228 - protein, 60 aa, Homo sapiens
  misc_feature (1)...(60): Xaa = X or * as defined in Table 2
RLDKQNRRQGKRQRNNGVFHQQPQRRXRTDVIQMPHSHHRHAQRRDHQQLGQHHAGRNFE

SEQ ID NO: 60229 - protein, 98 aa, Homo sapiens
  misc_feature (1)...(98): Xaa = X or * as defined in Table 2
VAASVSSSMSCAPVLMTVVTRCTLLILSQFMRRKAIKKLSGSLLPASEVKVLKRDGDYSEVQQXAPSDQKRDFLVPHGADSAMAKHGGSHRAVLPQGW

SEQ ID NO: 60230 - protein, 714 aa, Homo sapiens; identical to SEQ ID NO: 59371
  DOMAIN (63)..(85): SUGAR TRANSPORTER SIGNATURE domain identified by eMATRIX, accession number PR00171D, p-value=8.953e-15, raw score of 12.76
  DOMAIN (222)..(423): Transposase domain identified by PFam, accession name Transposase_15, E-value=9.6e-114, PFam score of 391.3

SEQ ID NO: 60231 - protein, 821 aa, Homo sapiens; identical to SEQ ID NO: 59372
  DOMAIN (172)..(204): BCCT family of transporters proteins domain identified by eMATRIX, accession number BL01303E, p-value=5.500e-37, raw score of 10.12
  DOMAIN (392)..(587): Transposase domain identified by PFam, accession name Transposase_15, E-value=3.8e-111, PFam score of 382.7

SEQ ID NO: 60232 - protein, 355 aa, Homo sapiens
  DOMAIN (85)..(116): Methylated-DNA--protein-cysteine methyltransferase active sit domain identified by eMATRIX, accession number BL00374B, p-value= 6.914e-23, raw score of 18.58
  DOMAIN (64)..(261): Transposase domain identified by PFam, accession name Transposase_15, E-value=8e-56, PFam score of 198.9
MCSFRSQTFCSSSRFTFARVSVIHSANHRVLNDRSTIMRTRGQDPTLPEMRRVRLLEMADAMDMFCQGLRYGPLPAPVRQQAAIIIPCHRVVRGDGTLSGYRWGVSRKAQLVRREAENEERPINRWLAEAGVMMTQGTLVDATIIEAPSSTKNKEQQRDPEMHQTKKGNQWHFGMKAHIGVDAKSGLTHSLVTTAANEHDLNQLGNLLHGEKQFVSADAGYQGAPQREELAEVDVDWLIAERPGKVKTLKQNPRKNKTAINIEYMKASIRARVEHPFRIIKRQFGFVKARYKGLLKNDNQLAMLFTLANLFRVDQMIPVYTDLLVNYTYRIAFEAAGGQDFGLLAAIATLIFLLV

SEQ ID NO: 60233 - protein, 402 aa, Homo sapiens
  DOMAIN (60)..(254): Transposase domain identified by PFam, accession name Transposase_15, E-value=1.5e-74, PFam score of 261.1
  misc_feature (1)...(402): Xaa = X or * as defined in Table 2
MSHQLTVAGGEFSSKRRQTRKEIFLSRMEQILPWQNMVEVIEPFYPKAGNGRRPYPLETMLRIHCMQHWYNLSDGAMEDALYEIASMRLFARLSLDSALPDRTTIMNFRHLLEQHQLARQLFKTINRWLAEDRRHDDSRQPCSTKNKEQQRDPEMHQTKKGNQWHFGMKAHIGVDAKSGLTHSLVTTAANEHDLNQLGNLLHGEKQFVSADAGYQRAPQRRGACRGGCGLADRRAPRQGKNLEAASTQEQTAHQHRIHESQHPGPGVEHPFRIIKRQFGFVIARYKGLLKNDNQLAMLFTLANLFRADQMIPLASTVEYGETVDGVVLEKDIQLVYGTANNTKINPGGEQHIKEFGVSNNTEINGGYQYIEMNGAAEYSVLNDGYQIVQMGGAANQTTLNNX

SEQ ID NO: 60234 - protein, 40 aa, Homo sapiens; identical to SEQ ID NO: 59373

SEQ ID NO: 60235 - protein, 135 aa, Homo sapiens
HGFQRIRSFSVSSLGVKRLDDFHHVLPWQNLLHAGQENLFSGLTALTAEFTFKINVLEQITKHIEKLQCGGVVKQLSRRGNNQHISSTYDINRADTQVRRAVNNYDIIVMSNSFNGQSEHQVWIGGQFTFIKFAH

SEQ ID NO: 60236 - protein, 106 aa, Homo sapiens; identical to SEQ ID NO: 59377

SEQ ID NO: 60237 - protein, 600 aa, Homo sapiens; identical to SEQ ID NO: 59379
  DOMAIN (485)..(537): ELEMENT TRANSPOSABLE INSERTION PROTEIN TRANSPOSITION DNA domain identified by eMATRIX, accession number PD02455C, p-value= 1.000e-40, raw score of 29.23
  DOMAIN (418)..(577): Integrase core domain identified by PFam, accession name rve, E-value=5.5e-47, PFam score of 166.5

SEQ ID NO: 60238 - protein, 67 aa, Homo sapiens
QRICTVKQLPLPIISRSEPSTNMAQLRPYQLKSRPVPKAPDFFGGEGFSAAHNDTVSAISGIKIPND

SEQ ID NO: 60239 - protein, 662 aa, Homo sapiens
  DOMAIN (471)..(501): Gram-negative pili assembly chaperone proteins domain identified by eMATRIX, accession number BL00635E, p-value=1.857e- 20, raw score of 25.34
  DOMAIN (352)..(539): Gram-negative pili assembly chaperone domain identified by PFam, accession name pili_assembly, E-value=2.6e-80, PFam score of 275.5
MLARKWLRYPKSGHMVLPAERYNNALAQSCYLVTAPELGKGEHRVYIAKQDDKPVAAVLEATAPDGYSGAIQLLVGADFNGTVLGTRVTEHHETPGLGDKIELRLSDWITHFAGKKISGADDAHWAVKKDGGDFDQFTGATITPRAVVNAGLWKNNSALVQLLGLCPLLAVTSTATNALGLGLATTLVLTLTNLTISTLRHWTPAEIRIPIYVMIIASVVSAVQMLINAYAFGLYQSLGIFIPLIVTNCIVVGRAEAFAAKKGPALSALDGFSIGMGATCAMFVLGSLREIIGNGTLFDGADALLGSWAKVLRVEIFHTDSPFLLAMLPPGAFIGLGLIRAHAAGGIALGATRIIYPADAKQTAVWIRNSHTNERFLVNSWIENSSGVKEKSFIITPPLFVSEPKSENTLRIIYTGPPLAADRESLFWMNVKTIPSVDKNALNGRNVLQLAILSRMKLFLRPIQLQELPAEAPDTLKFSRSGNYINVHNPSPFYVTLVNLQVGSQKLGNAMAAPRVNSQIPLPSGVQGKLKFQTVNDYGSVTPRYTWCLAGICYSSLAILPSFLSYAESYFNPAFLLENGTSVADLSRFERGNHQPAGVYRVDLWRNDEFIGSQDIVFESTTENTGDKSGEGMAIATTKRQVENLHRQFSGYLHRCGSGVGD

SEQ ID NO: 60240 - protein, 85 aa, Homo sapiens
  misc_feature (1)...(85): Xaa = X or * as defined in Table 2
PPYKRRKRRRESVSDGMRNTGKTRRTRXIINLLGRSXNRNFVSVPSGQNYPXISLDHGRENYGGYSTIQNRLLRLPLSRSGCILQ

SEQ ID NO: 60241 - protein, 97 aa, Homo sapiens
YALFFSLSFSLVTGVGAKPGRYQSLIFVVVVGCTFQNQEPLREEDSDFILTEGDLTLTYGDSTVTANGSSSSHTASTSLEGSRRTKSSSEEVLERDL

SEQ ID NO: 60242 - protein, 207 aa, Homo sapiens
KYGVNPGPYGGTTRKLYEKKLLKLREQGTESRSSTPLPTISSSAENTRQNGSSDSDRYSDNEEDSKIELKLEKREPLKGRAKTPVTLKQRRVEHNQSYSQAGITETEWTSGSSKGGPLQALTRESTRGSRRTPRKRVETSEHFRIDGPVISESTPIAETIMASSNESLVVNRVTGNFKHASPILPITEFSDIPRRAPKKPLTRAEVG

SEQ ID NO: 60243 - protein, 990 aa, Homo sapiens
  DOMAIN (219)..(266): + TRANSPORT EXCHANGER NA H TRANS domain identified by eMATRIX, accession number PD01672I, p-value=9.273e-11, raw score of 17.98
  DOMAIN (4)..(293): Sodium/hydrogen exchanger family domain identified by PFam, accession name Na_H_Exchanger, E-value=4.2e-20, PFam score of 80.2
DRAGHDLGGSFVGVILRYGTPGTRGRDKLLNCTQEDQAFSTLVVDVSGKFFEYTLKREISPGKINSVKQNDMLGKSVGIFLGIFSGCFTMGAVTGVVTALVTKFTKLDCFPLLETALFFLMSWSTFLLAEACGFTGVVAVLFCGITQAHYTFNNLSVESRSRSKQLFEVLHFLAENFIFSYMGLALVTFQKHVFSPIFIIGAFVAIFLGRAAHIYPLSFFLNLGRRHKIGWNFQHMMMFSGLRGAMAFALAIRDTASYARQMTFPTTPFIVFFTIWIIGGGTTPMLSWLNIRVSIKEPSKEDHNEHHRQYFRVGVDPDQDPPPNNDSFQVLQGDSPDSARGNWTKQESTWIFRRCPQVYDNQEPLREGNSDFILTEGDLTLTYGDSTVTANGFSGSHTASTSLEGSWRMKSSSEEVLEQDVGMGNQKVSSQGTTRKLYEKKLLKLREQGTESRSSTPLPTISSSAENTRQNGSNDSDRYSDNEEGKKKEHKKVKSTRDIVPFSELGTTPSGGGFFQGISFPEISTRPPLGSTELQAAKKVHTSKGDLPREPLVATNLPGRGQLQKLASERNLFISCKSSHDRCLEKSSSSSSQPEHSAMLVSTAASPSLIKETTTGYYKDIVENICGREKSGIQPLCPERSHISDQSPLSSKRKALEESESSQLISPPLAQAIRDYVNSLLVQGGVGSLPGTSNSMPPLDVENIQKRIDQSKFQETEFLSPPRKVPRLSEKSVEERDSGSFVAFQNIPGSELMSSFAKTVVSHSLTTLGLEVAKQSQHDKIDASELSFPFHESILKVIEEEWQQVDRQLPSLACKYPVSSREATQILSVPKVDDEILGFISEATPLGGIQAASTESCNQQLDLALCRAYEAAASALQIATHTAFVAKAMQADISQAAQILSSDPSRTHQALGILSKTYDAASYICEAAFDEVKMAAHTMGNATVGRRYLWLKDCKINLASKNKLASTPFKGGTLFGGEVCKVIKKRGNKH

SEQ ID NO: 60244 - protein, 322 aa, Homo sapiens
  DOMAIN (38)..(188): TruB family pseudouridylate synthase domain identified by PFam, accession name TruB_N, E-value=1.4e-94, PFam score of 327.6
PGRQQGGLMSRPRRRGRDINGVLLLDKPQGMSSNDALQKVKRIYNANRAGHTGALDPLATGMLPICLGEATKFSQYLLDSDKRYRVIARLGQRTDTSDADGQIVEERPVTFSAEQLAAALDTFRGDIEQIPSMYSALKYQGKKLYEYARQGIEVPREARPITVYELLFIRHEGNELELEIHCSKGTYIRTIIDDLGEKLGCGAHVIYLRRLAVSKYPVERMVTLEHLRELVEQAEQQDIPAAELLDPLLMPMDSPASDYPVVNLPLTSSVYFKNGNPVRTSGAPLEGLVRVTEGENGKFIGMGEIDDEGRVAPRRLVVEYPA

SEQ ID NO: 60245 - protein, 113 aa, Homo sapiens
FAKFSHLNRGHSNYRAGSSTGGAVHKMGDDVHRFGNLFLISPSSNSILSNYSPADKKKFYVETERAESPKQAIMMSYKEWGPDGQGINNIESHEHAMLTLLKEHRDMTLPTRK

SEQ ID NO: 60246 - protein, 427 aa, Homo sapiens
RRAVKGNKRPLPTGGEIMQAAGNQLFTGAAFADDEHRFVQRCEMRNLFQHFEKAVRLTKNQEDNIMGIFSRFADIVNANINALLEKAEDPQKLVRLMIQEMEDTLVEVRSTSARALAEKKQLTRRIEQASAREVEWQEKAELALLKEREDLARAALIEKQKLTDLIKSLEHEVTLVDDTLARMKKEIGELENKLSETRARQQALMLRHQAANSSRDVRRQLDSGKLDEAMARFESFERRIDQMEAEAESQALSFPRLWIRVLSNNNNRTYLILYHLCNYELWPSSFLSPVNTWIGFCPYGKHPGFDLFRTRFKELTHRTNDKLPDSRPLAKAYRDAWRGGGQQKALGFRTWTRSIRAPVWIIRVTLNMKNVIVTILESTGNGMFAPNTHNIQPPDQQAPISIHMWHASLVCNVGHATHRTQRPTVGD

SEQ ID NO: 60247 - protein, 547 aa, Homo sapiens
  DOMAIN (146)..(171): Hypothetical cof family proteins domain identified by eMATRIX, accession number BL01228D, p-value=4.158e-12, raw score of 17.44
  DOMAIN (451)..(522): AcrB/AcrD/AcrF family domain identified by PFam, accession name ACR_tran, E-value=1.3e-23, PFam score of 89.9
MFGKRSAYAVRQCINVIVVIGVITYKRYPRNATFARQNACQFIPYRTDRRTGELRIKRQHHNMIYMLCQEFIYGAFHGEPPSIQTEAYSFATRGERSGKITPRSNGHHNNRESLCNVIGDIVDAQYKAKTLTRLAQEYEIPLAQTVAIGDGANDLPMIKAAGLGIAYHAKPKVNEKAEVTIRHADLMGVFCILSGSLNQKGSAVPVMPGTLARAAARKELDVEVIEAELAKLAEQPIEKDWRSAPLAEIIDHIIVRYHDRHREQLPELILQATKVERVHADKPSVPKGLTKYLTMLHEELSSHMMKEEQILFPMIKQGMGSQAMGPISVMESEHDEAGELLEVIKHTTNNVTPPPEACTTWKAMYNGINELIDDLMDHISLENNVLFPRALAGRCLRYTRYEQRIIVQTNINRIAETVVIIAMHSQDSDLAKRVIEGDKNVNMMEVAIDEACVRIIAKHYSTVARYNGKPAAGIAIKLAAGANALDTSRAVKEELNRLSAYFPASLKTVYPYDTTPFIEISIPFSASPLFQATSSYLKNWQHLLIGL

SEQ ID NO: 60248 - protein, 44 aa, Homo sapiens
RRIRHKQSALCQQSVYPVALCLCVQRHPAAILHSSCKPEDVWAA

SEQ ID NO: 60249 - protein, 102 aa, Homo sapiens
  DOMAIN (7)..(50): Transcriptional regulatory protein C terminal. domain identified by eMATRIX, accession number PF00486C, p-value=2.884e- 23, raw score of 20.21
RVPEFPHNNPGRSDRIDRIVGLEMGADDYVTKPLELRELVVRVKNLLWRIDLARQAQPHTQDNCYRFAGYCRSDTQQGPTPRKVTDVLQTGQQIWFVRLAMH

SEQ ID NO: 60250 - protein, 32 aa, Homo sapiens
LPVIRSQLRRKSSDQNSPLLTRALKLPLLNSA

SEQ ID NO: 60251 - protein, 153 aa, Homo sapiens
LVFLFIDYEEQHITAVWVYLTVKFEEHWKPVEVTMTAVATTKLLPEHRFKRRHHFCNQHRCRYRGPCGTGSGNSGSAIATANQFIGDNQRNTGHDNYCHTQQDPQQTSLGNHSQINGIAQREGKEWNQRLHRFAEKFSQFRVKVPQGKAHQER

SEQ ID NO: 60252 - protein, 733 aa, Homo sapiens
  DOMAIN (254)..(297): Transcriptional regulatory protein C terminal. domain identified by eMATRIX, accession number PF00486C, p-value=6.700e- 31, raw score of 20.21
  DOMAIN (189)..(290): Response regulator receiver domain identified by PFam, accession name response_reg, E-value=1.1e-22, PFam score of 88.9
MKVKDAIVDAFTRKNLARPNVDRDAPDIRVNVWLHKETASIALDLSGDGLHLRGYRDRAGIAPIKETLAAAIVMRSGWQPGTPLLDPMCGSAIELKGHKMQQLDSIISAKGQTAYSSVILGNVGNQLLTMQITLPADDQQKAQTTAENIINTLVIHVVRSARRVRPVGGPTIHPTSTFPRRPGLTSLLPQFPVVLSRFYRQEGYTVSVTASGAGLREIMQNQSVDLILLDINLPDENGLMLTRALRERSTVGIILVTGRSDRIDRIVGLEMGADDYVTKPLELRELVVRVKNLLWRIDLARQAQPHTQDNCYRFAGRERLLRMLSARRVENPDLRPVDVLIRRLRHKLSADLLVTQHGADPTTTLDPRSACNAWHLGPARPLHHTRSAGPRATNHLSVTQLNRLAATLPRISESRYPRFMTNAKLPDALRLSGLRGSINLLNLHNFVGRIRRSRRIRHKLSALCQQSSPMINPSGYFYCAPRCCRNRMVAATRPLVLLITYGPYNIPSSKNRRYTMAVVVQLLFGYMMWKKWGSLGQLGSLTVLASHFSFTLVIPRPIITDKVITPVFCNSSYKPPSVKFHGGTYGRNEVTRGSVVAAAWRKLEISRCCTTELPLSPTIRKAVGTWVSTAYAAYRYMQQGVGGFTANPMTGGTHGYGQVRGRTYCGDSSVRYLSLILYIPPLFNARVRQQHSGTTGSCQISISNIRAKSALYDHTWVLRPLVNRRYVPRRYAG

SEQ ID NO: 60253 - protein, 743 aa, Homo sapiens
  DOMAIN (193)..(212): Signal carboxyl-terminal domain proteins domain identified by eMATRIX, accession number PF00512, p-value=8.200e-13, raw score of 13.94
  DOMAIN (195)..(393): Histidine kinase domain identified by PFam, accession name signal, E-value=3.4e-45, PFam score of 163.6
MNHYPSATPLETTEDRCRSGVLGRLIQITVVMRWRAILRSFEHDNSEDKPGPVLGGINNKVLVGPRAPIPPDGTRRPILVNGAEVGAVIASPVERLTRNTDINFDKQQRQTSWLIVALATLLAALATFLLARGLLAPVKRLVDGTHKLAAGDFTTRVTPTSEDELGKLAQDFNQLASTLEKNQQMRRDFMADISHELRTPLAVLRGELEAIQDGVRKFTPETVASLQAEVGTLTKLVDDLHQLSMSDEGALAYQKAPVDLIPLLEVAGGAFRERFASRGLKLQFSLPDSITVFGDRDRLMQLFNNLLENSLRYTDSGGSLQISAGQRDKTVRLTFADSAPGVSDDQLQKLFERFYRTEGSRIACCVSPMIVGKQMQFFGARANLAKTMLYAINGGVDEKLKMQVGPKSEPIKGDVLNYDEVMERMDHFMDWLAKQYISDLTWIASCKPYFIGKRHHTVVGRKISLNTLRTCINQSINGWISRLQQEQLGDKTRVTLLGDYAHTHGYDVVAYGNTGTQAQTDNDGFLSKTLYGALEHNFTDAWSGFVRGYGYDNRTNYDAYYSPGSPLLDTRKLYSQSWDAGLRYNGELINAKYTGVVMNNSEGLKSFQQSLADLPQWVSERLLQQINQLTNYEPVIGIMGKTGVGKSSLCNALFAGDISPVSDVAACTREPLRFRLQVGDRYITLMDLPGVGESGARDTEYAALYREQLPRLDLVLWLIKADDRALTVDEHFYHQVTWRGIPA

SEQ ID NO: 60254 - protein, 55 aa, Homo sapiens
QSGPSGGALLEFAGSSLPNPVCLRFSPGGSKPAKWGQSPPGKFPRQPHWMPRQSG

SEQ ID NO: 60255 - protein, 131 aa, Homo sapiens
  misc_feature (1)...(131): Xaa = X or * as defined in Table 2
CTIVIRSRCFWWKTAWAQKMNLLPMARLTTTIALATYANISAQWAKRLQTAFRXWATPHGAVLIXFPALRVKXANATALSLLTVTTQATGRLRARQRKTATPRTIRPGESTSSSPRSSGSLSAPACSVPWM

SEQ ID NO: 60256 - protein, 219 aa, Homo sapiens
  DOMAIN (129)..(170): glpT family of transporters proteins domain identified by eMATRIX, accession number BL00942G, p-value=9.000e-40, raw score of 18.21
KQPSAVSGTGAAGEANLHAVRTAEQTAVVYRHRQRVRYLLRYGILDWSPTYLKEVKHFALDKSSWAYFLYEYAGIPGTLLCGWMSDKVFRGNRGATGVFFMTLVTIATIVYWMNPAGNPTVDMICMIVIGFLIYGPVMLIGLHALELAPKKAAGTAAGFTGLFGYLGGSVAASAIVGYTVDFFGWDVGFMLSHELWESEFTKLKYEYNNSCPASVSGWL

SEQ ID NO: 60257 - protein, 143 aa, Homo sapiens
  DOMAIN (74)..(89): Inosine-uridine preferring nucleoside hydrolase family signat domain identified by eMATRIX, accession number BL01247A, p-value= 2.406e-17, raw score of 10.06
  misc_feature (1)...(143): Xaa = X or * as defined in Table 2
NCRKTSPKRRFSFDDPKSDRAKDFLAKILHXSLWRAYPIARHLTLYRFAPRICYILALPLSQRSTQQGATMALPILLDCDPGHDDAIAIVLALASPELDVKAITSSAGNQTPEKTLRNVLRMLTLLNRTDIPVAGGRGKTVNA

SEQ ID NO: 60258 - protein, 678 aa, Homo sapiens
  DOMAIN (430)..(485): MOLYBDENUM PROTEIN TRANSPORT MOL domain identified by eMATRIX, accession number PD02450, p-value=3.400e-09, raw score of 21.43
  DOMAIN (6)..(353): Xanthine/uracil permeases family domain identified by PFam, accession name xan_ur_permease, E-value=0.024, PFam score of -113.4
MAQRIFTLILLLCSTSVFAGLFDAPGRSQFVPADQAFAFDFQLIAGIASIAMGIFANLPVALAPAMGLNAFFAFVIVGPMGISWQTGMGAIFWGAVGLFLLTLFRIRYWMISNIPLSLRIGITSGIGLFIALMGLKNTGVIVANKDTLVMIGDLSSHGVLLGILGFFIITVLSSRHFHAAVLVSIVVTSCCGLFFGDVHFSGVYSIPPDISGVIGEVDLSGALTLELAGIIFSFMLINLFDSSGTLIGVTDKAGLIDGNGKFPNMNKALYVDSVTFGGGCVYRHLVMNQLSEHILVERATGGKGVVGAVLTRYGQRLIQLYDLLAQIQQKAFDVLSDDDALPLNSLLAAISRFSLQTSARNQWFGTITARDHDDVQQHVDVLLADGKTRLKVAITAQSGARLGLDEGKEVLILLKAPWVGITQDEAVAQNADNQLPGIISHIERGAEQCEVLMALPDGQTLCATVPVNEATSLQQGQNVTAYFNADSWDGTELECCLNDGGIDQGALSHHDACFGQPAIDGLEQLAGQLMLLQQAVREHSRLQLWCRGQIREPLCHRAIRIVPGTDVSPLPALLLSLRCLFCSFCRPTRRWLLRYRWMTRVLPVSVNSSSTIRSSSRVFMLDEKSSNTASVVVLCTAPDEATAQDLAAKVLAENRGGLRDLDPRRYLSLLLGRHCWNA

SEQ ID NO: 60259 - protein, 836 aa, Homo sapiens
  DOMAIN (655)..(683): Zinc-containing alcohol dehydrogenases proteins domain identified by eMATRIX, accession number BL00059B, p-value=2.286e- 22, raw score of 16.08
  DOMAIN (613)..(836): Zinc-binding dehydrogenases domain identified by PFam, accession name adh_zinc, E-value=1.8e-27, PFam score of 104.7
MAWLLIIYILPLVGIIAYLAVGELHLGKRRAEAHLRLWPSTAKWLNDLKACKHIFAEENSSVAAPLFKLCIASSGDSLEVKGNQLQLMTESDDVMQALIRDIQLARHNIEMVFYIWQPGGMGGPVRIPRLSWCYVRHQMKRQPGFSRQSAGGKTGGLRDLDPRRYLSLLLGSLIIHIKPRNFWFYLLHTETQITSHGSTHLYADPATLQHFRFCRIIRRAGTFTICPRDQAFAFDFQQNQHDLNLTWQIKDGYYLYRKQIRITPEHAKIADVQLPQRPGMKMSFTQKQDLPASADASRHHQPGNAGARFLSKTLYGALEHNFTDAWSGFVRGYGYDNRTNYDAYYSPGSPLLDTRKLYSQSWDAGLRYNGELIKSQLITSYSHSKDYNYDPHYGRYDSSATLDEMKQYTVQWANNVIVGHGSIGAGVDWQKQTTTPGTGYVEDGYDQRNTGIYLTGLQQVGDFTFECAARSDDNSQFGRHGTWQTSAGWEFIEGYRFIASYGTSYKAPNLGQLYGFYGNPNLDPEKSKQLEGAFECLTAGVNWRISGYRNDVSDLIDYDDHTLEYLQLRTHPGRVSTVKVFYCRNFEKNCADLTNIIRKGGTMKAAVVTKDHHVDVTYKTLRSLKHGEALLKMQCCGVCHTDLHVKNGDFGDKTGVILGHEGIGVVAEVGPGVTSLKPGDRASVAWFYEGCGHCEYCNSGNETLCRSVKNAGYSVDGGMAEECIVVADYAVKVPDGLDSAAASSITCAGVTTYKAVKLSKIRPGQWIAIYGLGGLGNLALQYAKNVFNAKVIAIDVNDEQLKLATEMGADLAINSHTERRRQKCAGEKLVALTLRW

SEQ ID NO: 60260 - protein, 38 aa, Homo sapiens
  misc_feature (1)...(38): Xaa = X or * as defined in Table 2
NALRKSASSCSGRNRYPGSXPSRPDCQRSCSHKHAGYG

SEQ ID NO: 60261 - protein, 74 aa, Homo sapiens
  misc_feature (1)...(74): Xaa = X or * as defined in Table 2
GGEGRASCSADTGWLPSDPPGCAAGALGGGGWAVAGAAAGGPCAXSAGGIGVHAPKAQHPATFSGPAEGVIPPQ

SEQ ID NO: 60262 - protein, 759 aa, Homo sapiens
  DOMAIN (635)..(687): ELEMENT TRANSPOSABLE INSERTION PROTEIN TRANSPOSITION DNA domain identified by eMATRIX, accession number PD02455C, p-value= 5.253e-11, raw score of 29.23
  DOMAIN (620)..(715): Integrase core domain identified by PFam, accession name rve, E-value=5.2e-17, PFam score of 62.8
MSHCIGGPIMSSGNNSIHIITELTVRLVQVMRVLLIKLVAPFIILPAPSRIAVFADERQRQAPVVAVVKMNFSRRCSNTLAAKDLKVVGQKATGINVSGDANTVNITGNVLVDKDKTADNAAEYFFDPSVGINVYGSDNNVTLDGKLTVVSDSEVTSRQSNLFDGSAEKTSGLVVIGDGNTVNMNGGLELIGEKNALADGSQVTSLRTGYSYTSVIVVSGESSVYLNGDTTISGEFPLGFAGVIRVQDKALLEIGSGATLTMQDIDSFEHHGTRTLDLPLYFQTSVMWRFTKRSQGYCLAIAGFYRATHSAGEWFAIDPVQLLGNQPDRHQPRVFMALSDNQNVVFDVFVHHIPRFFGTFFGATDTQTFTLTESVIHQPLVLTNFIAIDGNDFARLRREITAQELAEFTFANEANAGRVFFLRGDQTKIFSNLTHLRFFQFADREQALRNLLMAERIKEVALVFIAVQTTQQAALAIDIGPTYVMTEYPDSACDRLYIREGTVRPAAGTQDEKEKMPHLDEDPAPPFWRLGHLMACRWSCRTERETQSDFGQFPNVQFPESPQIQLHVPVALSIRSGHRNLGAHADESWKTLLGCEELEKDVEIPDRAGHTIVVPSCWFAVERRFGHDLPSSPVEWLTDNGSCYRANETRQFARMLGLEPKNTAVRSPESNGIAESFVKTIKRDYISIMPKPDGLTAAKNLAEAFEHYNEWHPHTPLPISSKALSCTRITPANPRGNSPLIVVSPFRYTDDSPLTTITL

SEQ ID NO: 60263 - protein, 729 aa, Homo sapiens
  DOMAIN (408)..(444): Bacterial regulatory proteins deoR family proteins. domain identified by eMATRIX, accession number BL00894A, p-value=5.304e- 27, raw score of 22.25
  DOMAIN (394)..(529): Bacterial regulatory proteins, deoR family domain identified by PFam, accession name deoR, E-value=2.1e-67, PFam score of 237.4
MVGNYLGSQQQTRIVPIVTLGLDRRTRDNNVTLDGKLTVVSDSEVTSRQSNLFDGSAEKTSGLVVIGDGNTVNMNGGLELIGEKNALADGSQVTSLRTGYSYTSVIVVSGESSVYLNGDTTISGEFPLGFAGVIRVAMVAHALAAIKNRKFGGNVNAERIALLAMYHDASEVLTGDLPTPVKYFNSQIAQEYKAIEKIAQQKLVDMVPEELRDIFAPLIDEHAYSDEEKSLWDVVLADVRWHDGAKKAFTLARQAGVMTVLDGDITPQDISELVALSDHAAFSEPGLARLTGVKEMASALKQAQTLTNGHVYVTQGSAGCDWLENGGRQHQPAFKVDVVDTTGAGDVFHGALAVALATSGDLAESVRFASGVAALKCTRPGIFMSLTELTGNPRHDQLLMLIAERGYMNIDELANLLDVSTQTVRRDIRKLSEQGLITRHHGGAGRASRIVNTAFEQREVSQTEEKKAIAEAVADYIPDGSTIFITIGTTVEHVARALLNHNHLRIITNSLRVARILPKNPRFEVMVPGATGERESAQTQEGRHSVATAEQKATVTTTTEHCSTTNLQKRIKADTDGRSESCNDMRRYLAHTANEQEHEQPNGHSAVGQTVANETTGSPISTGSEQELRRKLAAPIMGKNGPEEIDATAEDYERDIAWCHEHGYLDDSRFVARFIASRSRKGRIACEGISVFGEVLWQGNDADAAQLEQLVGQPVRVSALARFSFAERH

SEQ ID NO: 60264 - protein, 1222 aa, Homo sapiens; identical to SEQ ID NO: 46210
  DOMAIN (1114)..(1165): Acyl-CoA dehydrogenases proteins domain identified by eMATRIX, accession number BL00072D, p-value=3.647e-33, raw score of 30.08
  DOMAIN (1039)..(1217): Acyl-CoA dehydrogenase domain identified by PFam, accession name Acyl-CoA_dh, E-value=3.1e-98, PFam score of 337.7

SEQ ID NO: 60265 - protein, 233 aa, Homo sapiens; identical to SEQ ID NO: 54834
  DOMAIN (101)..(115): Phage integrase family domain identified by eMATRIX, accession number PF00589B, p-value=1.450e-14, raw score of 16.17
  DOMAIN (1)..(153): "Phage" integrase family domain identified by PFam, accession name Phage_integrase, E-value=1.9e-06, PFam score of 24.8

SEQ ID NO: 60266 - protein, 168 aa, Homo sapiens
  misc_feature (1)...(168): Xaa = X or * as defined in Table 2
TGGVCCWCARYVDALVVFADQLFVAEVLASAHSPSRLYAHAHGDTPQRLRLNGRQALSPXFCCNHRAALQRHQPVRPLPARQSRQMRRCNLLYQKASAQRSQRDSSXRSLFFRSVDADGGXRXSHGYAFRHGRFQCHRPHGLPGTGPPRHADSAFSRRLIYPACRWRL

SEQ ID NO: 60267 - protein, 24 aa, Homo sapiens
NRRWPTSNRLLKPAKSRAKPTARW

SEQ ID NO: 60268 - protein, 92 aa, Homo sapiens
  misc_feature (1)...(92): Xaa = X or * as defined in Table 2
MGVNDAVLEMHGLGNDFMVVDAGFDQLLVVEPPYDLELDFHYRMFNADGSDSGAVRQRCALLCPFCASERTDQXAXYPRQHRQRADGSDRHR

SEQ ID NO: 60269 - protein, 1225 aa, Homo sapiens
  DOMAIN (946)..(1000): Respiratory-chain NADH dehydrogenase subunit 1 proteins domain identified by eMATRIX, accession number BL00667B, p-value= 4.240e-38, raw score of 18.18
  DOMAIN (942)..(1111): NADH dehydrogenases domain identified by PFam, accession name NADHdh, E-value=3.1e-92, PFam score of 319.8
GQEQHYLGPLNGPELLVVLPEAKAVGSVAMSMLGSDADLGVVLFTSRDASHYQQGQGTQLLHEIALMLPELLERWIERRQLEAIINFASENGLQSWQQCDVTMVRNFAVRSRRKGLGAASLALRLSALRSFFDWLVSQNELKANPAKGVSAPKAPRHLPKNIDVDDMNRLLDIDINDPLAVRDRAMLEVMYGAGLRLSELVGLDIKHLDLESGEVWVMGKGSKERRLPIGRNAVAWIEHWLDLRDLFGSEDDALFLSKLGKRISARNVQKRFAEWGIKQGLNNHVHPHKLRHSFATHMLESSGDLRARGAYLCAKLLSGAAQVPEWRSAFAWFARCAEQARQNQYLQVSSCVPALEGCDVNGASFTLEQMLAWRDHPQVTGLAEMMDYPGVISGQNALLDKLDAFRHLTLDGHCPGLGGKELNAYITAGIENCHESYQLEEGRRKLQLGMSLMIREGSAARNLNALAPLINEFNSPQCMLCTDDRNPWEIGHEGHIDALIRRLKCITEFIEQDTEEARQQATRPIEVIEGPLMDGMNVVGDLFGEGKMFLPQVVKSARVMKQAVAYLEPFIEASKEQGKTNGKMVIATVKGDVHDIGKNIVGVVLQCNNYEIVDLGVMVPAEKILRTAKEVNADLIGLSGLITPSLDEMVNVAKEMERQGFTIPLLIGGATTSKAHTAVKIEQNYSGPTVYVQNASRTVGVVAALLSDTQRDDFVARTRKSRNPGGTANAQSTFEQKAANPFDNNNDGLPDLGMAPENHDGEKHFAEIVKDFGETSMNDNGLDTGEQAKAFALGKVREWWSMPDNDIRRRRTARHSRLKENLPLITLIVMMAISWGLEQFNHPFGQLAFIATTLVGLYPIARQALRLIKSGSYFAIETLMSVAAIGALFIGATAEAAMVLLLFLIGERLEGWAASRALWRLTAIAPPLGQQLVGTLAHVPPFFLMMAGLAVYAVLFAGWSSNNKYSLLGAMRASAQTLSYEVFLGLSLMGVVAQAGSFNMTDIVNSQAHVWNVIPQFFGFITFAIAGVAVCHRHPFDQPEAEQELADGYHIEYSGMKFGLFFVGEYIGIVTISALMVTLFFGGWQGPLLPPFIWFALKTAFFMMMFILIRNVLRLENLPAADADQLAGNGGCHSLAGAIRGNKTMTLKELLVGFGTQVRSIWMIGLHAFAKRETRMYPEEPVYLPPRYRGRIVLTRDPDGEERCVACNLCAVACPSAVSRCKSRG

SEQ ID NO: 60270 - protein, 436 aa, Homo sapiens
  DOMAIN (92)..(147): Sodium:solute symporter family proteins domain identified by eMATRIX, accession number BL00456C, p-value=5.622e-33, raw score of 24.55
  DOMAIN (1)..(362): Sodium:solute symporter family domain identified by PFam, accession name SSF, E-value=8.4e-08, PFam score of -0.2
AYKSGMSVMGWEVTSAVTLIFLALIFLPRYLKRGIATIPDFLEERYDKTTRIIIDFCFLIATGVCFLPIVLYSGALALNSLFHVGESLQISHGAAIWLLVILLGLAGILYAVIGGLRAMAVADSINGIGLVIGGLMVPVFGLIAMGKGSFMQGIEQLTTVHAEKLNSIGGPTDPLPIGAAFTGHRATHLASKSLAEGQKGALLTAVLKMLDPLVLVLPGLIAFHLYQDLPKADMAYPTLVNNVLPVPMVGFFGAVLFGAVISTFNGFLNSASTLFSMGIYRRIINQNAEPQQLVTVGRKFGFFIAIVSVLVAPWIANAPPGLYSWMKQLNGIYNVPLVTIIIMGFFFPRIPALAAKVAMGIGIISYITINYLVKFDFHFLYRNCERTCRLLLLKGDGPVTVEGKTVASDRKRYSGISKLTVNTRQHLLRITQRLPR

SEQ ID NO: 60271 - protein, 44 aa, Homo sapiens
  misc_feature (1)...(44): Xaa = X or * as defined in Table 2
VTWWXRAPTAGLMQCXYCRNRRARLRLTYGHAPAHRRNGPDVPS

SEQ ID NO: 60272 - protein, 87 aa, Homo sapiens
  misc_feature (1)...(87): Xaa = X or * as defined in Table 2
TLRPANRFXHIPDAAGVIPVGYALXRGTSVSAVHRWCSTVFGVNWATLATKLMVAGIRRSGAASRISRASPPSFSVPACSVGRKKVI

SEQ ID NO: 60273 - protein, 1213 aa, Homo sapiens
  DOMAIN (638)..(693): Sodium:solute symporter family proteins domain identified by eMATRIX, accession number BL00456C, p-value=5.622e-33, raw score of 24.55
  DOMAIN (1080)..(1185): Oxidoreductase FAD/NAD-binding domain identified by PFam, accession name oxidored_fad, E-value=1.1e-26, PFam score of 102.0
MPISPASRPLDFTSLRDAVTEFEQHRYEHACKIEFNRRRTLPVNGVSDALVSEGNLLSRENESLDNEITAALEVGYLLRLAHNSSSMVEQTMYVSRAGFYVSTQPTLFTRNVPTRYYGYVTQPWFIGHSQRENRHRAVRWFTSQPEHASNTEPQVTVSVPVDSNNYWYGVLGMSIPVRTMQQFLRNAIDKNLDGEYQLYDSKLRFLTSSNPDHPTGNIFDPRELALLAHAMEHDTRGGIRMDSRYVSWERLDHFDGVLVRVHTLSEGVRGDFGSISIALTLLWALFTTMLLISWYVIRRMVSNMYVLQSSLQWQAWHDTLTRLYNRGALFEKARPLAKLCQTHQHPFSVIQVDLDHFKAINDRFGHQAGDRVLSHAAGLISSSLRTGFKAVINRTAPISIKPKTRFQGGKSPLKRPNSPPDYRFAQRNLKSPPAFNRKPLFPFIRGFAQRPKGRKMLLGPAQARFRGLLEINDLRIPATISFVASVAQFTPKTVETSDERLKLMFRVKARIPPELLQQHLEYVKTGLPGVAWVRVNEELPWPDDLVAYKSGMSVMGWEVTSAVTLIFLALIFLPRYLKRGIATIPDFLEERYDKTTRIIIDFCFLIATGVCFLPIVLYSGALALNSLFHVGESLQISHGAAIWLLVILLGLAGILYAVIGGLRAMAVADSINGIGLVIGGLMVPVFGLIAMGKGSFMQGIEQLTTVHAEKLNSIGGPTDPLPIGAAFTGLILVNTFYWCTNQGIVQRTLASKSLAEGQKGALLTAVLKMLDPLVLVLPGLIAFHLYQDLPKADMAYPTLVNNVLPVPMVGFFGAVLFGAVISTFNGFLNSASTLFSMGIYRRIINQNAEPQQLVTVGRKFGFFIAIVSVLVAPWIANAPQGLYSWMKQLNGIYNVPLVTIIIMGFFFPRIPALAAKVAMGIGIISYITINYLVKFDFHFLYRNCERTCRLLLLKGDGPVTVEGKTVASDRKRYSGISKLTVNTRQHLLRITQRLPRLDAEALINLVRHVTPRLYSIASSQPEVENEVHVTVGVVRYDVEGRERAGGASSFLADRVEEEGEVRVFIEHNDNFRLPANPETPAPVLAPFRAFMQQRAADEAPGKNWLFFGNPHFTEDFLYQVEWQRYVKDGVLTRIDLAWSRDQKEKVYVQDKLREQGAELWRWINDGAHIYVCGDANRMAKDVEHTLVRVIRKFSSIDYPLESTDKSTTIHGSQ

SEQ ID NO: 60274 - protein, 318 aa, Homo sapiens
  DOMAIN (267)..(317): Sigma-70 factors family proteins domain identified by eMATRIX, accession number BL00715, p-value=7.097e-32, raw score of 24.82
  DOMAIN (40)..(75): Bacterial regulatory proteins, merR family domain identified by PFam, accession name merR, E-value=4.2e-12, PFam score of 53.6
MGFRRTMPHIVISALVGGLLLVFADCLAWTCRHDKLDDISDVAKITGLTSKAIRFYEEKGLVTPPMRSENGYRTYTQQHLNELTLLRQARQVGFNLEESGELVNLFNDPQRHSADVKRRTLEKVAEIERHIEELQSMRDQLLALANACPGDDSADCPIIENLSGCCHHRAGKYVGLIRRVKRRIRHRCWPIKTLSQRAVSEFQRLIQPNHQYQSYTRQCAPETDNHADNSYNAGLFIVNSLYTAEGVMDKHSLWQRYVPLMRHEALRLQVRLPASVELDDLLQAGGIGLLNAVERYDALQGTAFTTYAVQRIRGAMLD

SEQ ID NO: 60275 - protein, 233 aa, Homo sapiens
  DOMAIN (98)..(148): Sigma-70 factors family proteins domain identified by eMATRIX, accession number BL00715, p-value=7.097e-32, raw score of 24.82
  DOMAIN (78)..(232): Sigma-70 factor domain identified by PFam, accession name sigma70, E-value=8.8e-33, PFam score of 122.3
MAKVSREICPAGPGYHYSASDLRYNTRPLGQEPPRVSLSQPRTLPATSRPSAETDNHADNSYNAGLFIVNSLYTAEGVMDKHSLWQRYVPLVRHEALRLQVRLPASVELDDLLQAGGIGLLNAVERYDALQGTAFTTYAVQRIRGAMLDELRSRDWVPRSVRRNAREVAQAIGQLEQELGRNATETEVAERLGIDIADYRQMLLDTNNSQLFSYDEWREEHGDSIELVTDSLF

SEQ ID NO: 60276 - protein, 76 aa, Homo sapiens
HQTHFIVEHRRIMQRTARQNIGRHYQIQLSAVQRIRGAMLDELRSRDWVPRSRRNAREVAQAIGQMSLPMLQVALS

SEQ ID NO: 60277 - protein, 524 aa, Homo sapiens
  DOMAIN (252)..(302): Sigma-70 factors family proteins domain identified by eMATRIX, accession number BL00715, p-value=7.097e-32, raw score of 24.82
  DOMAIN (232)..(418): Sigma-70 factor domain identified by PFam, accession name sigma70, E-value=1.5e-30, PFam score of 114.9
MPMVVCAAKSYLTQYGIPEKPADLSSHSWLEYSVRPDNEFELIAPEGISTRLIPQGRFVTNDPMTLVRWLTAGAGIAYVPLMWVINEINRGELEILLPRYQSDPRPVYALYTEKDKLPLKVQVVINSLTDYFVEVGARGPFVHVERLIILLKIVKLLRSTGNSQVIDFQRWLGHDKRATLLLWKLEAAGSPLRPLSVQVTTPQEVAETDNHADNSYNAGLFIVNSLYTAEGVMDKHSLWQRYVPLVRHEALRLQVRLPASVELDDLLQAGGIGLLNAVERYDALQGTAFTTYAVQRIRGAMLDELRSRDWVPRSVRRNAREVAQAIGQLEQELGRKATETEVAERLGIDIADYRQCCSTPLRQSSLHEPQRLQRQCYERQRRAKDVFQIEGDTKEMTLNETCDPGLDPQLGKKCNKQHYWENCTQSQCITFWLLSANPSINRGTLEKESRTVAQRLSVLHGINAPEFFDKAVFSSLVLTLRDEGYISDSGDAEPAETMKVYQLLAELITSDVRLTIESATQGEG

SEQ ID NO: 60278 - protein, 95 aa, Homo sapiens
  DOMAIN (39)..(50): LYSR BACTERIAL REGULATORY PROTEIN HTH SIGNATURE domain identified by eMATRIX, accession number PR00039B, p-value=3.160e- 10, raw score of 6.01
  DOMAIN (13)..(51): Bacterial regulatory helix-turn-helix protei domain identified by PFam, accession name HTH_1, E-value=2.6e-12, PFam score of 52.8
  misc_feature (1)...(95): Xaa = X or * as defined in Table 2
MISANRPIINLDLDLLRTFVAVADLNTFAAAAAAVCRTQSAVSQQMQRLEQPLGKNCSLVTVATNCXLNMAFNFLVTPGKSCVLMMRSCIQPNSD

SEQ ID NO: 60279 - protein, 365 aa, Homo sapiens
  DOMAIN (87)..(137): Sigma-70 factors family proteins domain identified by eMATRIX, accession number BL00715, p-value=7.097e-32, raw score of 24.82
  DOMAIN (67)..(277): Sigma-70 factor domain identified by PFam, accession name sigma70, E-value=6.5e-68, PFam score of 239.0
MACCGMSWPWLESCKADCALAQPKAPFHSSSPPQGEDQFLVVPTSNGINSYNARLFIVNSLYTAEGVMDKHSLWQRYVPLVRHEALRLQVRLPASVELDDLLQAGGIGLLNAVERYDALQGTAFTTYAVQRIRGAMLDELRSRDWVPRSVRRNAREVAQAIGQLEQELGRNATETEVAERLGIDIADYRQMLLDTNNSQLFSYDEWREEHGDSIELVTDDHQRENPLQQLLDSNLRQRVMEAIETLPERDKLVLELNTDRDERSRQIHGEHLQRTRGNQLRLTEQLRHLDCRGQRRIFYQANKAVRQRRQRHTRRLWQNRATHGLPRRHTNTGWRFPLTFINRRNGGAQRFGSIGGSVQRQTNHC

SEQ ID NO: 60280 - protein, 86 aa, Homo sapiens
  misc_feature (1)...(86): Xaa = X or * as defined in Table 2
LILRCPWSYSRCIRILIAPSSSXQTEAKPFASRASRTSDDCQWANISSVMPVKPNSTTPSILRRFSTPKCSATNCGENXLSIMIGS

SEQ ID NO: 60281 - protein, 379 aa, Homo sapiens
PQSQAWQCILTPLTSPAWGMLEKLAPTWSGRNASHHQTSYRDGPLTQAMEFEDKAQQRDVETARHFTFFRIIANEDKKTGFPRFQTIVITASHKTIDRTRYTYGAWRCYRPLLTVEEYRATGSLITQPKFPPHKSSEVHRVPRNQGRFVAVNSTLPTEPATVAPVRNGNASRDTAKTQTAERPSTTRPARQQAVIEPKKPQATVKTEPKPVAQTPKRTEPAAPVASTKAPAATSTPAPKETATTAPVQTASPAQTTATPAAGAKTAGNVGSLKSAPSSHYTLQLSSSSNYDNLNGWAKKENLKNYVVYETTRNGQPWYVLVSGVYASKEEAKKAVSTLPADVQAKNPWAKPLRQRHRDLRGDERRDDRRSEYFNRQVIS

SEQ ID NO: 60282 - protein, 224 aa, Homo sapiens
KDSQPVDKPEFFLLLAYQWLAYCDSARNPAMPDMAALPATAVGAIIDEKCVAYSPDLKPIPVGVIVADSLDMDSAEKPERTYRIYIAAVVMTTGNSGTDGIIDRHEESRNALKILGCQQTIHLNFADTRAHLQLNDMISALEDIIKNQIPSDVEIMRVYTMHDADRHQDHLAVYQASMVACRTIPQILGYETPSTWLSFMPQVFESVKEEYFTVKLAALKKHKS

SEQ ID NO: 60283 - protein, 931 aa, Homo sapiens
  DOMAIN (866)..(878): Putative esterase domain identified by eMATRIX, accession number PF00756A, p-value=2.459e-13, raw score of 10.94
  DOMAIN (321)..(508): D-alanyl-D-alanine carboxypeptidase domain identified by PFam, accession name Peptidase_S11, E-value=4.8e-09, PFam score of -3.9
MEALLQLKGIDKAFPGVKALSGAALNVYPGRVMALVGENGAGKSTMMKVLTGIYTRDAGTLLWLGKETTFTGPKSSQEAGIGIIHQELNLIPQLTIAENIFLGREFVNRFGKIDWKTMYAEADKLLAKLNLRFKSDAKVSFGNSFARCVAGGCMNIRRKNRLWIACAVLAGLALTIGLVLYALRSNIDLFYTPGEILYGKRETQQMPEVGQRLRVGGMVMPGSVQRDPNSLKVTFTIYDAEGSVDVSYEGILPDLFREGQGVVVQGELEKGNHILAKEVLAKHDENYTPPEVEKAMEANLERNSRRAQGREGRCETGSRYHRFTTGNCLRAMIVDLNTNKVIYSNHPDLVRPIASISKLMTAMVVLDARLPLDEKLKVDISQTPEMKGVYSRVRLNSEISRKDMLLLALMSSENRAAASLAHHYPFRAHGNKKAQPVAPIKHCFGKGVIPTYQPDANCEYRRMLSRETHGGVWCSVWGSVFTLNAGFPWGVWIAFDLLIGTGFCLCRLGAGVAVYVFNRGQYHPLVRPALLASLFGYSLGGLSITIDVGRYWNLPYFYIPGHFNVNSVLFETAVCMTIYIGVMALEFAPALFERLGWKVSLQRLNKVMFFIIALGALLPTMHQSSMGSLMISAGYKVHPLWQSYEMLPLFSLLTAFIMGFSIVIFEGSLVQAGLRGNGPDEKSLFVKLTNTISIAKSLIARRLKFAFQNARAFEYLMTRFSTPEEVFGPLSIQALKDEGRYERLTSGYLPEAEIVFLDEIWKAGPAILNTLLTAINERQFRNGAHVEKIPMRLLVAASNELPEADSSLEALYDRMLIRLWLDKVFRAHFGGWQNMYRHYSQSLKCEMNVGVYLPPKAANEKLPVLYWLSGLTCNEQNFITKSGMQRYAAEHNIIVVAPDTSPRGSHVADADRYDLGQGAGFYLNAFRAQYG

SEQ ID NO: 60284 - protein, 59 aa, Homo sapiens
  misc_feature (1)...(59): Xaa = X or * as defined in Table 2
KSLNAICYRNTRTSMACYXPAXVRWPKHSAGLMTISPVLHVISPRHWRLECATRVGRLG

SEQ ID NO: 60285 - protein, 928 aa, Homo sapiens
  DOMAIN (533)..(563): Putative esterase domain identified by eMATRIX, accession number PF00756D, p-value=8.364e-26, raw score of 16.93
  DOMAIN (14)..(166): Fimbrial proteins domain identified by PFam, accession name Fimbrial, E-value=2.7e-20, PFam score of 80.9
MILSNNVFADEGHGIVKFKGEVISAPCSIKPGDEDLTVNLGEVADTVLKSDQKSLAEPFTIHLQDCMLSQGGTTYSKAKVTFTTANTMTGQSDLLKNTKETEIGGATGVGVRILDSQSGEVTLGTPVVITFNNTNSYQELNFKAPDKHLTARQYASLRAENRLDPRFEFVVFQRQTDGFRRDDMVIVIIINISVTITPRGGYDLRIVLKENIAPESLSKTQTGRGMPTAQHCRRYLDFAPPPSDMAEMFTAKLPDHNAYTTVADMIKPEETCLRHYYLLACDRCCRSWHHQLCSNDNNHQTNKHRYRGAFYDFKRRDLRHPGNRNDYARNGRKGTAKHCQNHQYQHQDDTRRTKRGSDRNQTLNKADGAKPLSEYPSGNQQHHHVSYEVVMKTSDNERIKYEITGQAVLQILRMKINFSLQTLIKQLLVMKSAEEDAFRRDLIDSIIRDFSNSDSGGPNRRTATADNKSMLQCPAVTLVKYAGYRFDVKPKAKAKPKTAGIKRPVVKMEKTAEKGGRPASNDEYVSVSAFSPIVSPSQVPWGQQAFAAYLAENKDAWLDYDPASPGPFRSSGSVLAFGPLNGLVPPGPMEENGEHSRQISKTSNCIDHLVEVRLVLGPSLSTCYQRGQLYTREGKTPKTRGPKWGHETRYEYNIAGDLTAVIAPDGSRNGTQYDAWGKAVRTTQGGLTRSMEYDAAGRVIRLTSENGSHTTFRYDVLDRLIQETGFDGNNHYRGNEHFDTQWNPLPDYNKDNPAHRFRAFGGTPGHWIEWGRLMLHIHAALEARCEQPPAWLLEDAKGLFNATVRDAWAPDGADGIVYTVDWEGKPVVRERVRWPIVEAMGTAYALYTVTGDRQYETWYQTWWEYCIKYLMDYENGSWWQELDADNKVTTKVWDGKQDIYHLLPLPGDPAYPVSARHGSSGCSGSAGY

SEQ ID NO: 60286 - protein, 507 aa, Homo sapiens
  DOMAIN (257)..(284): Putative esterase domain identified by eMATRIX, accession number PF00756B, p-value=7.750e-26, raw score of 16.64
  DOMAIN (226)..(414): Putative esterase domain identified by PFam, accession name Esterase, E-value=2.4e-61, PFam score of 217.2
KRKVLLDGYGSPDLSDEFVNELTAAGVVFRYYDPRPRLFGMRTNVFRRMHRKIVVIDARIAFIGGLNYFRRGICSSLRSRRLKQGFTRYRFEGPDLSKDIPSGFEAWKNLPWTRSAGNNAGWPTFNPQKRKEKPANPGRKPPGICWVWAADKPGNHPPMDRAQIACLQVSHDLYRHYSHSLKYEMNVGVYLPPKAANEKLPVLYWLSGLTCNEQNFITKSGMQRYAAEHNIIVVAPDTSPRGSHVADADRYDLGQGAGFYLNATQAPWNEHYKMYDYIRNELPDLVMHHFPATAKKSISGHSMGGLGALVLALRNPDEYVSVSAFSPIVSPSQVPWGQQAFAAYLAENKDAWLDYGPVIKKALHVDVKDVPGAGAAGGMGAALMAFLGAELKSGIEIVTTALNLEEHIHDCTLVITGEGRIDSQSIHGKVPIGVANVAKKYHKPVIGIAGSLTDDVGVVHQHGIDAVFSVLTSIGTLDEAFRGAYDNICRASRNIAATLAIGMRNAG

SEQ ID NO: 60287 - protein, 156 aa, Homo sapiens
  DOMAIN (143)..(156): Aminopeptidase P and proline dipeptidase proteins domain identified by eMATRIX, accession number BL00491B, p-value=8.950e- 10, raw score of 5.42
  DOMAIN (1)..(156): metallopeptidase family M24 domain identified by PFam, accession name Peptidase_M24, E-value=1.5e-08, PFam score of 37.6
GAEHIRRFIQAGMSEREIAAELEWFMRQQGAEKASFDTIVASGWRGALPHGKASDKIVAAGEFVTLDFGALYQGYCSDMTRTLLVNGEGVSAESHLLFNVYQIVLQAQLATISAIRPGVRCQQVDDAARRVITEAGYGDYFGHNTGHAIGIEGHED

SEQ ID NO: 60288 - protein, 109 aa, Homo sapiens
  misc_feature (1)...(109): Xaa = X or * as defined in Table 2
QFAFTEHHQTQEHHHQRSYDCPQRDPRHIDAQVSDQRPCPDSGLREPLHCAQPDSGGXADNSADHIRRNGGDGAFQRKRNRTLTDPHKRQEHGGLTLRIKLSVEQAFAG

SEQ ID NO: 60289 - protein, 149 aa, Homo sapiens
LEAGGPRGGKLPVRGPLSPACGRTHPDMKSAKGIENLAFVPSSPDILRRLSASPSQIEVSALSSDPQRENSQPQELQKPQEPQKSPEPSLPSAPPNVSEEKLRSLSLSEFEEGSYGWRNFHPQCLQRCNTPGGFLLHYWPLGRHARYCS

SEQ ID NO: 60290 - protein, 440 aa, Homo sapiens
PVRRKIQMTLLASLRSWLKAQQLDAVLLSSRQNKQPHLGISTGSGYVVISRESAHILVDSRYYVEVEARAQGYQLHLLDATNTLTTIVNQIIADEQLQTLGFEGQQVSWETAHRWQSELNAKLVSATPDVLRQIKTPEEVEKIRLACGIADRGAEHISRFIQAGMSEREIAPELEWFMRQQGAEKASFDTIVGILRELQKPQEPQKSPEPSLPSAPPNVSEEKLRSLSLSEFEEGSYGWRNFHPQCLQRCNTPGGFLLHYCLLAVTQGKVQRPLEARASGERGRAVISIWGSPPNQLYVVINSVSVLAMVRLRYYVMVEARVLAFQLHLPVHLSKVSTIAYRIIADHQLHPFGFMGQQFSCGTVHSCQSLSIASMVRSPQDDLRRLFTPEYVVEYSCLCTVVICSIVECRCIFPASFRCGSASPRSHLLRSGICPCSARV

SEQ ID NO: 60291 - protein, 79 aa, Homo sapiens
RAFTARQYAGRRRSASRHLGASARPERQTDRTSPHPAQCLAADDHRRGDAYRRTDWRDDDYRKHLCLAGRRALCGVGDF

SEQ ID NO: 60292 - protein, 50 aa, Homo sapiens
PFCLIVIWALLLAIPRTTGANPFRLSGSMLSSDASCTPRKLTLSKKSPAV

SEQ ID NO: 60293 - protein, 424 aa, Homo sapiens
  DOMAIN (22)..(77): Fimbrial biogenesis outer membrane usher protein domain identified by eMATRIX, accession number BL01151, p-value=1.000e-40, raw score of 29.09
  DOMAIN (22)..(152): Fimbrial Usher proteins domain identified by PFam, accession name Usher, E-value=7.1e-76, PFam score of 265.5
MEESQQLFATGGYSSERRTDRDFFDSVSFRGVQLASDDNMLPDSLKGFAPVVRGIAKSNAQITIKQNGYTIYQTYVSPGAFEISDLYSTSSSGDLLVEIKEADGSVNSYSVPFSSVPLLQRQGRIKYAVTLAKYRINSNEQQESKFARVEYDETGKCCASGESRRDGKSIACGSYGSHHWLRGLNDKQTERRHILRNASLPMITAVGMHIGELIGGTMIIENIFAWPGVGRYAVSAIFNRDYPVIQCFTLMMVVVFVLLDGNADDIMTNRSSYPVAATSTVTGGYAQSDAQGQMNKMGGFNLKYRYEEDNSPLGVIGSFTYTEKSRTASSGDYNKNQYYGITAGPAYRINDWASIYGVVGVGYGKFQTTEYPTYKHDTSDYGFSYGAGLQFNPMENVALDFSYEQSRIRSVDVGTWIAGVGYRF

SEQ ID NO: 60294 - protein, 60 aa, Homo sapiens
YRNTMSLNFLDFEQPIAELEAKIDSLTAVSRQDEKLDINIDEEVHRLREKSVELTRKIFA

SEQ ID NO: 60295 - protein, 44 aa, Homo sapiens
RLRSGTSNSTPPIPNPMPRNLTLPINKPTTATKARILTVNAISL

SEQ ID NO: 60296 - protein, 214 aa, Homo sapiens
  misc_feature (1)...(214): Xaa = X or * as defined in Table 2
RLTTPSLSVCWRPAAKRPILPRSLKQLKKIASRKVTPXSLGNAWNNLEKQRAYLSMMAQKRVDGLLVMCSEYPEPLLAMLEEYRHIPMVVMDWGEAKADFTDAVIDNAFEGGYMAGRYLIERGHREIGVIPGPLERNTGAGPPCRFYEGDGRSDDQVDGDIQFFFSTNTITGRGHFRTMVDGICPCKDGNLRFNRILEHREPFYPQIPATFAYA

SEQ ID NO: 60297 - protein, 154 aa, Homo sapiens
  misc_feature (1)...(154): Xaa = X or * as defined in Table 2
AIVKFKRNVHQDGGYCSVQIQQCRFALIFKDFCRMRHNGLIRRTISQQSVGRIRCVSIASGRVYYCFFALEGKKPSSSISAAPTQMAVSARLKVAKCQSPTXKSIISTTKPCHRRSNRLPSAPPIISATRVHRQMRYSTSSGAAALLSITVTPS

SEQ ID NO: 60298 - protein, 520 aa, Homo sapiens
  DOMAIN (268)..(295): MARCKS family proteins domain identified by eMATRIX, accession number BL00826C, p-value=2.800e-09, raw score of 7.63
  DOMAIN (57)..(132): Aconitase family (aconitate hydratase) domain identified by PFam, accession name aconitase, E-value=3.9e-38, PFam score of 126.9
MSSTLREASKDTLQAKDKTYHYYSLPLAAKSLGDITRLPKSLKVLLENLLRWQDGNSVTEEDIHALAGWLKNAHADREIAYRPARVLMQDFTGVPAVVDLAAMREAVKRLGGDTAKVNPLSPVDLVIDHSVTFDRLADDVHLKNGPFSISFMAPFPEHRVQGALQRVVLRKNIKTFWTIRHNCLRLASVQGFLQMFRQLGNASGESLSIMMCLRSVCGGTRMPTSSASGALWLQSISLACHWTCRQTRSLGLTGCDDKKAETETLPPANSQPAAPAPEAKPTEAPVAKAEAKPETRAQPVVDEQAVFDEKMDVYIKCYNKLQIPVQRSLARYADWLKDFKQGPTGEERTVYGIYGISESTLAECEKGVKSAVALTPALQPIDGVARREKADNDMAPLQQKLVVVSNKREKPINDRRSRQQEVTPAGTSIRYEASFKPQSGGMEQTFRLDAQQYHALTVGDKGVSAIGHHHFLAIGQGGMKFTGTCCWHQQIITGADDLHRAADAIRMVTKVSAFEGVKST

SEQ ID NO: 60299 - protein, 50 aa, Homo sapiens
  misc_feature (1)...(50): Xaa = X or * as defined in Table 2
PMRELISKGVSPFAISNSGLLTSLLTSVVXIDAIDGIRFSFLSWASGKGP

SEQ ID NO: 60300 - protein, 58 aa, Homo sapiens
  misc_feature (1)...(58): Xaa = X or * as defined in Table 2
SLEETEKYRNVNEMCFPVKRRRREREKTSERTPAPVXVKITTRKLYPAEERTGRIFEA

SEQ ID NO: 60301 - protein, 1031 aa, Homo sapiens
  DOMAIN (442)..(474): ATP phosphoribosyltransferase proteins domain identified by eMATRIX, accession number BL01316D, p-value=3.000e-31, raw score of 17.54
  DOMAIN (393)..(512): ATP phosphoribosyltransferase domain identified by PFam, accession name HisG, E-value=1.4e-19, PFam score of 78.5
MDKFLNTYTLPRLNREEVESLNRPVTASGLEVIINSLPIKKSPGPDGFTAAFYQRYKEDAGEREGEGGNQQVAVRGKRKTTERKKKLGEDVKVKESKNSGAYEVKQHRFFRSLDWNSLLRQKAEFIPQLESEDDTSYFDTRSEKYHHMETEEEDDTNDEDFNVEIRQFSSCSHRFSKAAEVSTRLLSTRVTEIEGWLIVQRNQKLLQSNLKQRSGEPLILDDDSHVPPELRAGYRLLKNAGCLPPELEQRREAIQLLDILKGIRHDDPQYQEVSRRLSLLELKLRQAGLSTDFLRGDYAGAQQGNRHAQFQIAWDYNAGEGVVQDYKQAMYWYLKAAAQGSVGAYVNIGYMYKHGQGVEKDYQAAFEWFTKAAECNDATAWYNLAIMYHYGEGRPVDLRQALDLYRKVQSSGTRDVSQEIRETEYLRGYVDNKGISFKSCLLNGSVEVAPRAGLADAICDLVSTGATLEANGLREVEVIYRSKACLIQRDGEMEESKQQLIDKLLTRIQGVIQARESKYIMMHAPTERLDEVIALLPGAERPTILPLAGDQQRVAMHMRREKADNDMAPLQQKLVVVSNKREKPINDRRSRQQEVTPAGTSIRYEASFKPQSGGMEQTFRLDAQQYHALTVGDKAVQTRRKGKSVPFRRWSSAGHLSVKWISIAPAAYHALGRVEQAEHPWRNHLREHSCELPFPRRFTRALVGSGMKPRLNGERVLICAAGKHPADAFTGLINELESAGQTVVLVVRNDDVLGVIALQDTLRADAATAISELNALGVKGVILTGDNPRAAAAIAGELGLEFKAGLLPEDKVKAVTELNQHAPLAMVGDGINDAPAMKAAAIGIAMGSGTDVALETADAALTHNHLRGLVQMIELARATQRQYPPEHHYCAGAERDLPRHHAVRDDRVVAGSAGRYGGDGAVLPTAVRSQEFAGWKRRNQPDPLSALRRARWHLHRGFHRRNRSPRPATEKSPSGGCEFRLSSEYAPVPDGNRSGPFRGQQSSGPLQNLPLRRRYLYKQRERDLAWFRKYF

SEQ ID NO: 60302 - protein, 861 aa, Homo sapiens; identical to SEQ ID NO: 55449

SEQ ID NO: 60303 - protein, 1047 aa, Homo sapiens
  DOMAIN (601)..(639): CARBOXYLASE PURINE BIOSYNTHESIS domain identified by eMATRIX, accession number PD01318D, p-value=3.250e-27, raw score of 17.51
  DOMAIN (857)..(982): Ribosomal protein S5 domain identified by PFam, accession name Ribosomal_S5, E-value=6.5e-43, PFam score of 155.4
MKLSKEKCDQVNAIERDKALAWVERNIKVPLTEPQKAGIASFCPYNIGPGKCFPSTFYKRLNAGDRKGACEAIRWWIKDGGRDCRIRSNNCYGQVIRRDQYALEPIKMLSQEKWTMSDIALTLSILALVAVVGLFIGNVKFRGIGLGIGGVLFGGIIVGHFVSQAGMTLSSDMLHVIQEFGLMGRSPGALGNLFDRVWHGFIVDMIDFYVGDWHFATFNLADTAICVGDPDTPGNPKTNSFTVALFLRHFARRRAVRRTKVGVRQQSNARKPLIITFPALVTTFHDSMRPLTSPKPVNIARVANYPPDEPIAELEAKIDSLTAVSRQDEKLDINIDEEVHRLREKSVELTRKIFADLGAWQIAQLARHPQRPYTLDYVRLAFDEFDELAGDRAYADDKAIVGGIARLDGRPVMIIGHQKGRETKEKIRRNFGMPAPEGYRKALRLMQMAERFKMPIITFIDTCVSRNRGLSVLTGNVGINGGNSGVREGSWDLGVEWFPMLENPVKTQISVFTWTDAIDHGTEMTATRDGVRGKEKLDVPIKFLWCYASNTLINQHGDIYHTHEANAQQQPHPKEMLSTIMQTLAYVAVMAMQCLSPPKGLLINDLHRRVHNSGHWTQNGASISQFEMHVRAITDLPLPQPVVNNPSVMINLIGSDVNYDWLKLPLVHLHWYDKEVRPGRKVGHLNLTDSDTSRLTATLEALIPLLPPEYASGVIWAQSVYAASGNGADCLMRRLRVLSGLQIPAPSVGRIRRLRRIRQWCRLPDATLARLIRPTNSRTLLSESLESLPSGKNAREVIAAVKDKLETLKSSLPEGVEIVTTYDRSQLIDRAIDNLSGKLLEEFIVVDQAKGGFEDVPVQKQTCTGQNTRFKAFVAIRDSGHTDLGVKCSKEVATAICGAIILAKLSVVPMRRGYWGNKIGKPHTIPCKVTGCHGSVLARVIPAPRSTGIVSAPMAKKLLLMAAINDCYTSARGCTAILGNFVDTTSVDSPSISVHGDPRELRQLSAFIRRSKVFIPLSRGCSSHACRSHSVYWCLPESLPAGANGDR

SEQ ID NO: 60304 - protein, 345 aa, Homo sapiens
  DOMAIN (4)..(36): Bacterial-type phytoene dehydrogenase proteins domain identified by eMATRIX, accession number BL00982A, p-value=8.767e- 13, raw score of 18.41
  DOMAIN (3)..(35): Pyridine nucleotide-disulphide oxidoreducta domain identified by PFam, accession name pyr_redox, E-value=5.3e-06, PFam score of 23.0
MRVVILGSGVVGVASAWYLNQAGHEVTVIDREPGAALETSAANAGQISPGYAAPWAAPGVPLKAIKWMFQRHAPLAVRLDGTQFQLKWMWQMLRNCDTSHYMENKGRCFELPVAVYAGGQAVLVKQCKAIGGPDRAPDTLNTMPIFKACTPDNRRAVWRHRAQTSPESRLLDMTAAWIEIANHHLQRFTTRLQQLGIKTNNLRHSGKTNAVIVYMIQSISLVDEMSCHLVLTTGGTGPARRDVTPDATLAVADREMPGFGEQMRQISLHFVPTAILSRQVGVIRKQALILNLPGQPKSIKETLEGVKDAEGVPYCIQLLEGPYVETAPEVVAAFRPKSARRDVSE

SEQ ID NO: 60305 - protein, 204 aa, Homo sapiens
RDCLNGKILMNTLRIGLVSISDRASSGVYQDKGIPALEEWLTSALTTPFELETRLIPDEQAIIEQTLCELVDEMSCHLVLTTGGTGPARRDVTPDATLAVADREMPGFGEQMRQISLHFVPTAILSRQVGVIRKQALILNLPGQPKSIKETLEGVKDPDGNVVVHGIFASVPYCIQLLEGPYVETAPEVVAAFRPKSARRDVSE

SEQ ID NO: 60306 - protein, 167 aa, Homo sapiens
  misc_feature (1)...(167): Xaa = X or * as defined in Table 2
MSWWRNNFWIILAVAIIVVSVGLGLILYCVCKWQLRRGNGHFTSPNPAQVNQEGVLHALNYSTLFPSPHFQPFPGLQKTVSLGCQLQMGTRXXXXXXXXXXXXXXXXXXXXXDFCEVSGEGSPPGSQAAAFLKSPHKKPFLGAFKPGPDRAXTTALNLVSQXFFLSP

SEQ ID NO: 60307 - protein, 35 aa, Homo sapiens
ISAFGCADPSRLPSPARPSPSMLVFTLSPHPPPAL

SEQ ID NO: 60308 - protein, 60 aa, Homo sapiens
  misc_feature (1)...(60): Xaa = X or * as defined in Table 2
IQTESNPQDILXNPSPPVFISKHSPNNSYCYAQSREKNKSHFHVFATTCNRALSIWYLMN

SEQ ID NO: 60309 - protein, 39 aa, Homo sapiens; identical to SEQ ID NO: 35083
  misc_feature (1)...(39): Xaa = X or * as defined in Table 2

SEQ ID NO: 60310 - protein, 113 aa, Homo sapiens; identical to SEQ ID NO: 35085

SEQ ID NO: 60311 - protein, 31 aa, Homo sapiens
TTNSNDCANLFPLVDLSIRELYISNYITLGI

SEQ ID NO: 60312 - protein, 31 aa, Homo sapiens; identical to SEQ ID NO: 60311

SEQ ID NO: 60313 - protein, 254 aa, Homo sapiens
  misc_feature (1)...(254): Xaa = X or * as defined in Table 2
TARAWLLLGPVWPCVSERWSKKPSPRGGRDPSDRDPAAFAARSTVPPRISAYERPVPWPGEWNDPRGPGRRASAVVSPREGNWGVLRDPRLQARKPRMVRSRQMCNTNMSVPTDGAVTTSQIPASEQETLVRQESEDYSQPXLLVALFIAAKKMXKSLKGKKPKTKKRVWNLVCPLMPLNLVXFVKVDLKMVALSMAKQDILWPALHDAKKLKKRNKPCPVCRQHNSNDCANLFPLVDLSIRELYISNYITLGI

SEQ ID NO: 60314 - protein, 143 aa, Homo sapiens
DAIISFFIGFGLRFGAKWNFANAYDNHVFVAGRLIYCLNIIFWYVRLLDFLAVNQQAGPYVMMIGKMVANMFYIVVIMALVLLSFGVPRKAILYPHEAPSWTLAKDIVFHPYWMIFGEVYAYEIDVCANDSVIPQICGPSTRP

SEQ ID NO: 60315 - protein, 361 aa, Homo sapiens
  DOMAIN (232)..(261): Zn-finger in Ran binding protein and others domain identified by PFam, accession name zf-RanBP, E-value=3.6e-08, PFam score of 40.6
TARAWLLLGPVWPCVSERWSKKPSPRGGRDPSDRDPAAFAARSTVPPRISAYERPVPWPGEWNDPRGPGRRASAVVSPREGNWGVLRDPRLQARKPRMVRSRQMCNTNMSVPTDGAVTTSQIPASEQETLVRPKPLLLKLLKSVGAQKDTYTMKEVLDAGVSEHSGDWLDQDSVSDQFSVEFEVESLDSEDYSLSEEGQELSDEDDEVYQVTVYQAGESDTDSFEEDPEISLADYWKCTSCNEMNPPLPSHCNRCWALRENWLPEDKGKDKGEISEKAKLENSTQAEEGFDVPDCKKTIVNDSRESCVEENDDKITQASQSQESEDYSQPSTSSSIIYSSQEDVKEFEREEAPRQRRECGI

SEQ ID NO: 60316 - protein, 74 aa, Homo sapiens
GTGQCANTKMSVPTDGAVTTSQIPSSPEQETRVRPKPLLLKLLKSVGAQKDTYYYGKRFLFNLGQYIYGLNDYY

SEQ ID NO: 60317 - protein, 205 aa, Homo sapiens
  DOMAIN (133)..(194): p53-associated protein (MDM2) domain identified by PFam, accession name MDM2, E-value=7.2e-47, PFam score of 169.1
TARAWLLLGPVWPCVSERWSKKPSPRGGRDPSDRDPAAFAARSTVPPRISAYERPVPWPGEWNDPRGPGRRASAVVSPREGNWGVLRDPRLQARKPRMVRSRQMCNTNMSVPTDGAVTTSQIPASEQETLVRPKPLLLKLLKSVGAQKDTYTMKEVLFYLGQYIMTKRLYDEKQQHIVNDCANLFPLVDLSIRELYISNYITLGI

SEQ ID NO: 60318 - protein, 87 aa, Homo sapiens
VVLMSFQVLGWEVEGGSVCLCATVQSCSQRGFGVLQGLIMGIDLSADASALSGFRSSSDGLWRPTHYGGLSGSSLTMSPETLRCSLF

SEQ ID NO: 60319 - protein, 116 aa, Homo sapiens
  misc_feature (1)...(116): Xaa = X or * as defined in Table 2
HQSEQMYQSSESCLLGTTAKARGHQLRTASACHFPSTPPFWSLTLESQREGRFKQPTLISCFCLFMSVPVVSAPPFSSSSSSSSSSSSSSRPWFPDQEARXLTSPVERPCRGLRPA

SEQ ID NO: 60320 - protein, 69 aa, Homo sapiens
  misc_feature (1)...(69): Xaa = X or * as defined in Table 2
VPTSPASLESKQSCPHVLCPVWEVEGHSVXTGKPDRPPRRKLLTLLLPVPWVPGQLAIKQEGQEPKKRH

SEQ ID NO: 60321 - protein, 98 aa, Homo sapiens
GLGRCPKARKPGPRGGKTLPPFPHRKRRGPGRPATRPKGHSQEGPLPAATLSHHCCTGLGVEAGGQKGLRTKGPVHAKPGQAQANPRHPPGLSSSGNW

SEQ ID NO: 60322 - protein, 77 aa, Homo sapiens
QKRVKVPWKAIHSSIPTCSKVKESSPASEPRGQEFVEDLGFWRVLLLIFVIALLSLGIAYYVSGVLPFVENQPELVH

SEQ ID NO: 60323 - protein, 148 aa, Homo sapiens
  DOMAIN (68)..(78): Ank repeat proteins domain identified by eMATRIX, accession number PF00023B, p-value=1.818e-09, raw score of 14.20
VTTERKDLILRLTRVPSTTSEQCRYVFVNDSSQTNGALAASLVIDGDFNYSKRLLESGFDPNIRDSRGRTGLHLAAARGNVDIWPVTGIKFGADSSGPQIYSRETQLFHLCGPCGILSNFWFPMGLKIDICNHQGATPLVLGKAQRSK

SEQ ID NO: 60324 - protein, 161 aa, Homo sapiens
MRHDILEYFSVYGTALSMWVSLMALADFDEPKRSTFVMFGVLTIAVRIYHDRWGYGVYSGPIGTAILIIAAKWLQKMKEKKGLYPDKSVYTQQIGPGLCFGALALMLRFFFEDWDYTYVHSFYHCALAMSFVLLLPKVNKKAGSPGTPAKLDCSTLCCACV

SEQ ID NO: 60325 - protein, 131 aa, Homo sapiens
LVLSPSLAPPSCPLLSRPSTQPSPWGASHLHRVHRSTLRPCSAWARAVRPPWKGPGETQLEVSGSCVHVGPAGPSGSRTRCPQAPRNCKAVGAARWTMVCPETETEEAYSPPAAPSWTPRPRPPTLSWSPH

SEQ ID NO: 60326 - protein, 67 aa, Homo sapiens
HPGDGKGDDDFCRDVELQGIGAQDAGNVEKLDRLVQPADRQAEDYAALGVGLQTAGSPEPPCQCIGK

SEQ ID NO: 60327 - protein, 365 aa, Homo sapiens
  DOMAIN (69)..(78): HYDROGENASE (FE) LARGE CHAIN domain identified by eMATRIX, accession number DM01782E, p-value=9.526e-09, raw score of 11.39
MDSRLYMLSFLPFLVLLVLIRNLRILTIFSMLANISMLVSLVIIIQYITQIITMTAVTGISNTHDHCPFKGVRGLVGSVLICVLRALQSAFGACCLAWDSPFKAVGYPLAQDRSRNAIQEPSPGIGDPKSLLGALPLWLSWYLYKANESIKLTSTKNVYANIYDNMTHNRPKLKTVQRSINCNGSSISPLTEEPPKLASAPFSAKNNDGFCHADTGSQPPFSHYLPPIITQPPLKPLAMWACGLSEVPAGILKVLIAEDSESVGLQLRNREKEFKTKEAAALESHSSLGTEVAQEGQKKRTSLQNYFQQNGGEGLASLLAFVCDTWTEIHEKCCINEEEWEKEAPVPRIGILDALEEYAARDIFL

SEQ ID NO: 60328 - protein, 327 aa, Homo sapiens
  DOMAIN (285)..(318): Ribosomal protein S13 proteins domain identified by eMATRIX, accession number BL00646B, p-value=9.294e-20, raw score of 21.42
  DOMAIN (207)..(317): Ribosomal protein S13/S18 domain identified by PFam, accession name Ribosomal_S13, E-value=2.1e-52, PFam score of 187.5
MAEVTHRQTAAAALHELDELQDELMSAVICTSPGINQKKADSPGSRAEGHCSFATWSLEMTASIPKSFKIISMLPTPKFIAVVKTFSVNFQLTYPTAALGDLKFLLKIQHLMITISPKSKKRISFKSYDYTSLLDVPAEEPSTEWGVRPSCQLLVSITHTTGEALKAETIPDGLRGYPMYSARSTSVHVPSTFAISVKWKTAFTIPAIKGVGQRYVHVVLRKADIDCTKRAGELTEDEVERVITIMQNPCQYKIPDWFLNTQKDVKDGKYSQVLANGLDNKLHEDLERLKKIRAHRGLCHSWGLHVQSQHTKTTGRHGRTVGVSKKK

SEQ ID NO: 60329 - protein, 222 aa, Homo sapiens
  DOMAIN (34)..(82): Ribosomal protein S13 proteins domain identified by eMATRIX, accession number BL00646A, p-value=9.746e-09, raw score of 25.82
  misc_feature (1)...(222): Xaa = X or * as defined in Table 2
TACRIRHGHAGRLCCSPCLLVIPLKSSQHILRVLNPPNLDGRRKIAFAHHCPFKGVGRRYAHVVLRKADIDLTKEGGENSLEDEVERVITHILQNPRQYKIPDWFLNKTRRMXKDGTYSPGPXPIGLGQQAPVKDLGADXKKIRAHXRGLRHFLGAFRVRGQAHQEPLGRRGRHPSGVSKEEIRSVGPCLVNKIVYIPKKKKKKKKVDAAANLVVVVVVGGR

SEQ ID NO: 60330 - protein, 77 aa, Homo sapiens
  DOMAIN (26)..(39): LUTEOVIRUS ORF6 PROTEIN SIGNATURE domain identified by eMATRIX, accession number PR00910A, p-value=6.464e-09, raw score of 2.51
CVLLCRGLSPASHRQAPRPTWGPSTPIPPPQPTCSPEPFQQIKRYLWLRVPLCSTGPGKYFKVFLASWVEWSVSDFI

SEQ ID NO: 60331 - protein, 168 aa, Homo sapiens
MTSWSAPSCTRATRIPSLSHGHTSSTAPLPSSPSPRRCSSCLPSTTWSSWSHLTEIRQYQQAPRSPSRPRPAAAPVTSAHCPGWPAWPPAPATTACTSSSVLTPWPRASPRCSGCWSRASLPRPTTCARPSTPASPSPENTKPGFFPRAFSLLRSTRRKSITSWLRGR

SEQ ID NO: 60332 - protein, 511 aa, Homo sapiens
  DOMAIN (217)..(244): P53 TUMOUR SUPRESSOR SIGNATURE domain identified by eMATRIX, accession number PR00386A, p-value=5.500e-35, raw score of 12.89
  DOMAIN (209)..(474): P53 domain identified by PFam, accession name P53, E-value= 7.3e-215, PFam score of 727.2
MKLLAKAPLNLLRAFEAAGRTGAFALAASELELSPSAISHAIRKLENLLDVRLFQRSTREITLTKEGEILLEHIQRGFNELQQGLALVTADESRPLRLHTAPSFAHQWLLPRLGHRRCCIHTAFHGPACLSRQLTVHGCRMRGTDSSPSSSVHRRHLPEAVMVITGYITGTVGEAQQLTVTAPRHGFPAAGGIFRCAGPGSPAFADSRGFRLGFLHSGTAKSVTCTYSPALNKMFCQLAKTCPVQLWVDSTPPPGTRVRAMAIYKQSQHMTEVVRRCPHHERCSDSDGLAPPQHLIRVEGNLRVEYLDDRNTFRHSVVVPYEPPEVGSDCTTIHYNYMCNSSCMGGMNRRPILTIITLEDSSGNLLGRNSFEVRVCACPGRDRRTEEENLRKKGEPHHELPPGSTKRALPNNTSSSPQPKKKPLDGEYFTLQIRGRERFEMFRELNEALELKDAQAGKEPGGSRAHSSHRSPKKQCRTASTIRDTDVSHHGLSPYIIDLSIYSLILIYSPM

SEQ ID NO: 60333 - protein, 883 aa, Homo sapiens
  DOMAIN (6)..(28): Bacterial regulatory helix-turn-helix protei domain identified by PFam, accession name HTH_1, E-value=0.018, PFam score of 15.2
MENLRDVRLFQRSTREITLTKEGEILLEQYSGDKPEEDRSVVVCSSLEDFFQGLKSASGNIGIHNRPTGFPANGAKISAYWVIPPPGNAAAGVDDGTIIALTCVWLLLSSFTATLPVPAWLIPVTPVVKQDMTKDIAHVVMRDSEALSVLYGVWGYEVPADSAWCDQAVRAGLACKSGNASLQTLVDQNLPWIASLKVGDKKLPVVVVRVGEASVDVLVGQQTWTLTHKWFESVWTGDYLLLWKMSPEGESTITRDSSEEEILWLETMLNRALHISTEPSAEWRPLLVEKIKQFQKSHHLKTDGVVGFSTLVHLWQVAHARAVCLAGRNTPLVRQNIRTMAMIQLLLGNMGMAGGGVNALRGHSNIQGLTDLGLLSQSLPGYMTLPSEKQTDLQTYLTANTPKPLLEGQVNYWGNYPKFFVSMMKAFFGDKATAENSWGFDWLPKWDKGYDVLQYFEMMKEGKNHGELNEVDSSKIQTEVFRLPSTCFAEENGSIVNSGRWLQWHWKGADAPGIALTDGEILSGIFLRLRKMYAEQGGANPDQVLNMTWNYAIPHEPSSEEVAMESNGKALADITDPATGAVIVKKGQQLSSFAQLRDDGTTSCGCWIFAGSWTPEGNQMARRDNADPSGLGNTLGWAWAWPLNRRILYNRASADPQDILITQKPVKCNKTHHAGKIAAIQQSFVSMNGGQATYCSRVSGYRDILPELDLVLWLIKADDRALSVDEYFWRHILQCGHQQVLFVVTQADQTEPCHEWDMAGIQPSPAQAQNIREKTEAVFRLFRPVHPVVAVSARTGWELDTLVSALMTALPDHAASPLMTRLQDELRTESVRSQAREQFTGAVDRIFDTAESVCIASVARTVLRAVRDTVVSVARAVWNWIFF

SEQ ID NO: 60334 - protein, 82 aa, Homo sapiens
  DOMAIN (43)..(77): Bacterial regulatory helix-turn-helix protei domain identified by PFam, accession name HTH_1, E-value=1e-08, PFam score of 39.1
RRPDGNAPSVHLTEENHIAILRGSTIQDVFDDFCIKELRYRASAISHAIRKLENLLDVRLFQRSTREITLTKEGEILHNPCS

SEQ ID NO: 60335 - protein, 293 aa, Homo sapiens
MKLMFASDIHGSLPATERVLELFAQSGAQWLVILGDVLNHGPRNALPEGYAPAKVAERLNEVAHKVIAVRGNCDSEVDQMLLHFPITAPWQQLYQWKGWFEANKMTPPNNYGLRFDRSFMAIAAAVDGLGVVLESKLLAEREIASGKLSADNHSEGPCEPFTLDFGDSLRDLGSSCKIKPFFQPGYQSAEGTVLSTGTGTERPTPLTVFLIHRAHEIPQTARHRHTALHRSLNNHQTTPGSPATHTTSTWSHERKTNRKQLNFVLLLLDKIYVFEKNIFQSLFIFKCYSVVEG

SEQ ID NO: 60336 - protein, 297 aa, Homo sapiens
  DOMAIN (23)..(57): Bacterial regulatory proteins lysR family proteins. domain identified by eMATRIX, accession number BL00044, p-value=9.182e-17, raw score of 19.03
  DOMAIN (9)..(147): Bacterial regulatory helix-turn-helix protei domain identified by PFam, accession name HTH_1, E-value=4e-34, PFam score of 126.8
MKLLAKAPVNLLRAFEAAGRTGAFALAASELELSPSAISHAIRKLENLLDVRLFQRSTREITLTKEGEILLEHIQRGFNELQQGLALVTADESRPLRLHTAPSFAHQWLLPRLGKFIRENPSIDLRLSASTEYARFEQDDFDLDIVYGEPRPSPYEKIPLAVEELTPLCSPQLAERLKKPEDLYALTLIQCDVQLYQWKGWFEANKMTPPNNYGLRFDRSFMAIAAAVDGLGVVLESKLLAEREIASGKLVCPLVNSTSEIHYIGHYLVFPQHQHMHSALDVFKTWLLNELNLGKIR

SEQ ID NO: 60337 - protein, 61 aa, Homo sapiens
  misc_feature (1)...(61): Xaa = X or * as defined in Table 2
WFETPAQYTNRSPESGTHYRRARSRARWHGCMECVCRRRKSPRANKPRRLPPVRXRCPPRA

SEQ ID NO: 60338 - protein, 378 aa, Homo sapiens
  DOMAIN (5)..(38): Bacterial export FHIPEP family proteins domain identified by eMATRIX, accession number BL00994D, p-value=2.667e-33, raw score of 15.38
  DOMAIN (83)..(162): PTS HPr component phosphorylation sites domain identified by PFam, accession name PTS-HPr, E-value=1.6e-46, PFam score of 168.0
MGHAAESYTLLTIGDGLVAQIPALVISTAAGVIVTRVSTDQDVGEQMVNQLSSNPSEIFLLAERDAATLLALLTSDDAPTDDVLSAEFVVRNEHGLHARPGTMLVNTIKQFNSDITVTNLDGTGKPANGRSLMKVVALGVKKGHRLRFTAQGADAEQALKHIGDAIAAGRIMSRRVATITLNPAYDLVGFCPEIERGEVNLVKTTGLHAAGKGINVAKVLKDLGIDVTVGGFLGQPVSRGAGANTENTPGLAALDTIRLTSSDGGVVPLSSIAKIEQRFAPLSINHLDQFPVTTISFNVPDNYSLGDAVQAIMDTEKTLNLPVDITTQFQGSTLAFQSALGSTVWLIVAAVVAMYIVLGILYESFIHPITILSTLPTA

SEQ ID NO: 60339 - protein, 92 aa, Homo sapiens
TTGAAVNFFLSRKKNTANIAKERLQIIVAERRRSDAEPHYLPQLRKDILEVICKYVQIDPEMVTVQLEQKDGDISILELNVTGSRRAEISPG

SEQ ID NO: 60340 - protein, 1115 aa, Homo sapiens; identical to SEQ ID NO: 55797
  DOMAIN (641)..(682): Sodium:alanine symporter family proteins domain identified by eMATRIX, accession number BL00873E, p-value=4.857e-35, raw score of 24.91
  DOMAIN (306)..(517): AcrB/AcrD/AcrF family domain identified by PFam, accession name ACR_tran, E-value=1.4e-91, PFam score of 317.6

SEQ ID NO: 60341 - protein, 93 aa, Homo sapiens
  misc_feature (1)...(93): Xaa = X or * as defined in Table 2
TPATVRRGWRPAVRVFRWWKPLTVPPRRKGPLSRGTGCRPVPLTTPSTGTVMRAGICAVKMLIVQKSPCMPPCXHRQWTMTGLWQAPAAIRPV

SEQ ID NO: 60342 - protein, 996 aa, Homo sapiens
  DOMAIN (552)..(566): pfkB family of carbohydrate kinases proteins domain identified by eMATRIX, accession number BL00583C, p-value=4.150e- 14, raw score of 7.19
  DOMAIN (343)..(564): pfkB family carbohydrate kinase domain identified by PFam, accession name pfkB, E-value=1.3e-95, PFam score of 307.9
MPVPQQFSLSQNGLVNAADNYQNAGWRTFFVDNQVKTLISEALVNNRDLRMATLKVQEARAQYRLTDADRYPQLNGEGSGSWSGNLKGNTATTREFSTGLNASFDLDFFGRLKNMSEAERQNYLATEEAQRASMTIKNVICDIDGVLMHDNVAVPGAAEFLHGIMDKGLPLVLLTNYPSQTGQDLANRFATAGVDVPDSVFYTSAMATADFLRRQEGKKAYVVGEGALIYELYKAGFTITDVNPDFVIVGETRSYNWDMMHKAAYFVANGARFIATNPDTHGRGFYPACGALCAGIEKISGTCRTARFNFTITLNPAYDLVGFCPEIERGEVNLVKTTGLHAAGKGINVAKVLKDLGIDVTVGGFLGKDNQDGFQQLFSELGIANRFQVVQGRTRINVKLTEKDGEVTDFNFSGFEVTPADWERFVTDSLSWLGQFDMVCVSGSLPSGVSPEAFTDWMTRLRSQCPCIIFDSSREALVAGLKAAPWLVKPNRRELEIWAGRKLPEMKDVIEAAHALREQGIAHVVISLGAEGALWVNASGEWIAKPPSVDVVSTVGAGDSMVGGLIYGLLMRESSEHTLRLATAVAALAARAYMAKTLLGAAARKAKLEIIDNPNDAEMGIVLGDSIPNDSALNGMINHYGTTPLIRQCVTPGMMALHEGRTYRVSAVIQERKWVYLHTDAEIIRLHDCVIDITPMPGILSSRAKPIPFAEDTCVPPEHLADYIAEFRALLDSHGLSYGMFGHVDAGVLHVRPALDMCDPQQEILMKQISDDVVALTAKYGGLLWGEHGKGFRAEYSPAFFGEELFAELRKVKAAFDPHNRLKPKEELPARKFFIPQKQNGTRESPVISLGDPNGASGFPPNAFAYHFVSAENSFPQSAYAQAFLKTKKLIELDACKPHIDDMVNGILWLLDNELRGPFNMVSPYPVRNEQFAHALGHALHRPAILRVPATAIRLLMGESSVLVLGGQRALPKRLEEAGFAFRWYDLEEALADVVR

SEQ ID NO: 60343 - protein, 1312 aa, Homo sapiens; identical to SEQ ID NO: 55168
  DOMAIN (546)..(586): CARBOXYLASE PURINE BIOSYNTHESIS domain identified by eMATRIX, accession number PD01318B, p-value=3.758e-13, raw score of 26.23
  DOMAIN (406)..(564): ATP-grasp domain identified by PFam, accession name ATP- grasp, E-value=1.2e-21, PFam score of 85.4

SEQ ID NO: 60344 - protein, 147 aa, Homo sapiens
  DOMAIN (128)..(147): Universal stress protein family domain identified by eMATRIX, accession number PF00582B, p-value=4.750e-15, raw score of 14.04
  DOMAIN (37)..(146): Universal stress protein family domain identified by PFam, accession name Usp, E-value=5.7e-08, PFam score of 39.9
QGERVMYKTIIMPVDVFEMELSDKAVRHAEFLAQDDGVIHLLHVLPGSASLSLHRFAADVRRFEEHLQHEAQERLQTMVSHFTIDPSRIKQHVRFGSVRDEVNELAEELGADVVVIGSRNPSISTHLLGSNASSVIRHANLPVLVVR

SEQ ID NO: 60345 - protein, 446 aa, Homo sapiens
  DOMAIN (403)..(435): Bacterial regulatory proteins araC family proteins. domain identified by eMATRIX, accession number BL00041, p-value=7.000e-18, raw score of 23.99
  DOMAIN (351)..(437): Bacterial regulatory helix-turn-helix protei domain identified by PFam, accession name HTH_AraC, E-value=1.8e-33, PFam score of 124.7
MVGVLEESNKAPKNQGLMFTMKQTSHTVPVGPVSSSANKASIWGVYEDEMESHMERCWRISQTSSKLTINSQGEGKAKQKLECGTLSIVLRSCEKNQERIKAAEKRNRSWTTLCGLGAWRPLLFEVEMFLLAYAVRHTIQVYRLSKYNTEEFITVYPTDPPKDWPVVTLIAEDDRHYNIPVRETFEDVFSDRSLRKVPWYVLAGNHDHLGNVSAQIAYSKISKRWNFPSPFYRLHFKIPQTNVSVAIIMLDTVTLCGNSDDFLSQQAERARDQLSPFEVRRWQQELNSPNEQIRQLAIDEIGLMLKRFSLSGWEPILVNKTSRTHKNSVSRHAQFYVSQMLGFIAENYDQALTINDVAEHVKLNANYAMGIFQRVMQLTMKQYITAMRINHVRALLSDTDKSILDIALTGGFRSSSRFYSTFGKYVGMSPQQYRKLSQQRRQTFSR

SEQ ID NO: 60346 - protein, 1446 aa, Homo sapiens
  DOMAIN (1413)..(1445): Bacterial regulatory proteins araC family proteins. domain identified by eMATRIX, accession number BL00041, p-value=7.469e-17, raw score of 23.99
  DOMAIN (536)..(629): Transposase domain identified by PFam, accession name Transposase_8, E-value=3.2e-38, PFam score of 140.4
MTRDNPVIPRFIHRREVVFIGQENGGIQNARFIAALFFQHGVNLCQRVGGLLKGIGVEVFRYTSVVERVVVDYYIRPAGFSIDTNDRGSVTDDFAPDGQLAKAIPGFKPREPQRQMAVAVTQAIEKGQPLVVEAGTGTGKTYAYLAPALRAKKKVIISTGSKALQDQLYSRDLPTVSKALKYTGNVALLKGRSNYLCLERLEQQALAGGDLPVQILSDVILLRSWSNQTVDGDISTCVSVAEDSQAWPLVTSTNDNCLGSDCPMYKDCFVVKARKKAMDADVVVVNHHLFLADMVVKESGFGELIPEADVMIFDEAHQLPDIASQYFGQSLSSRQLLDLAKDITIAYRTELKDTQQLQKCADRLAQSAQDFRLQLGEPGYRGNLRELLANPQIQRAFLLLDDTLELCYDVAKLSLGRSALLDAAFERATLYRTRLKRLKEINQPGYSYWYECTSRHFTLALTPLSVADKFKELMAQKPGSWIFTSATLSVNDDLHHFTSRLGIEQADSCSIGNSYVFRLVIGEQMIDVLGPEKRRRRTTQEKIAIVQQSFEPGMTVSLVARQHGVAASQLFLWRKQYQEGSLTAVAAGEQVVPASELAAAMKQIKELQRLLGKKTMENELLKEAVEYGRAKKWIAHAPLLPGDGERTDDWMDGRRSRHTDDTDVLLRIHHVIGELPTYGYRRVWALLRRQAELDGMPAINAKRVYRIMRQNALLLERKPAVPPSKRAHTGAEGCGPVEQGNSQFQRNALHWAVTTGGFNSETVQDVMLGAVERRFGNDLPWSPVECLTDIGSCYRPNETRQFARMLGLEPKNTAVRSPESNGIAESFVKTIKRDYISIMPKPDGLTAAKNLAEAFEHYNEWHPHRANPDANVVSEDVLRESVGKSVVNLIHGVRDMAAIRQLKATHTDSVSSEQVDNVRRMLLAMVDDFRCVVIKLAERIAYLREVKDAPEDERVLAAKECTNIYAPLANRLGIGQLKWELEDYCFRYLHPTEYKRIAKLLHERRLAALFIRRAVNRDRIANAPAQRKQPLDVIHMIMRQQKLLERSGRPAIGEIVQPGVDQGDCVVKLHYAAARLAAILRRAPRSGAGRTLAAPCRNALCAAGAVDMMQMKLQMQADHADNFAIKQRQMVAHVWVAQIGVKTHAKRVVEREPSMNTDTFMCSSDEKQTRSPLSLYSEYQRMEIEFRAPHIMPTSHWHGQVEVNVPFDGDVEYLINNEKVNINQGHITLFWACTPHQLTDTGTCQSMAIFNLPMHLFLSWPLDKDLINHVTHGMVIKSLATQQLSPFEVRRWQQELNSPNEQIRQLAIDEIGLMLKRFSLSGWEPNLGNKTSRTHKNSVSRHAQFYVSQMLGFIAENYDQALTINDVAEHVKLNANYAMGIFQRVMQLTMKQYITAMRINHVRALLSDTDKSILDIALTAGFRSSSRFYSTFGKYVGMSPGSSRST

SEQ ID NO: 60347 - protein, 341 aa, Homo sapiens
  DOMAIN (298)..(330): Bacterial regulatory proteins araC family proteins. domain identified by eMATRIX, accession number BL00041, p-value=4.857e-19, raw score of 23.99
  DOMAIN (246)..(332): Bacterial regulatory helix-turn-helix protei domain identified by PFam, accession name HTH_AraC, E-value=4.8e-35, PFam score of 129.8
MNTTGHNKHKPNQRTDNTYTPTHHKQAAHRYASRSQPPDQESMTNPRPAGGQNGNDEGRKTSLIRSSDPPHQAARQKGTAAPSPPHRRTEDVHAEDPAVHASCLQVDSRASPFDGDVEYLINNEKVNINQSMAIFNLPMHLFLSWPLDKDLINHVTHGMVIKSLATQQLSPFEVRRWQQELNSPNEQIRQLAIDEIGLMLKRFSLSGWEPILVNKTSRTHKNSVSRHAQFYVSQMLGFIAENYDQALTINDVAEHVKLNANYAMGIFQRVMQLTMKQYITAMRINHVRALLSDTDKSILDIALTAGFRSSSRFYSTFGKYVGMSPQQYRKLSQQRRQTFPG

SEQ ID NO: 60348 - protein, 226 aa, Homo sapiens
MFRVTWSSGRTGLGKRLFRTPYDNDDTGPYAFNKTHPKDNYTCTVLFIDDMSASGQSLDKAQDNYRQAMKKLSSGRGNVLAQAEAFRGLGVEIKREINPDLAEQAIRLQDCVFDTQETMTTTFTGTVSSANSGNYYTIFNTDTGAAFNNVSLAIGNYVVLAFSASVGADMKMVNSTITASGSKRSTTVLRQGLSQRWLLSAGARNLLQHYSFRETCANWNMLFIGR

SEQ ID NO: 60349 - protein, 190 aa, Homo sapiens
  DOMAIN (177)..(190): Fimbrial proteins domain identified by eMATRIX, accession number PF00419C, p-value=8.500e-10, raw score of 10.47
  DOMAIN (33)..(190): Fimbrial proteins domain identified by PFam, accession name Fimbrial, E-value=1.8e-20, PFam score of 81.4
GQIMSKFVKTAIAAAMVMGAFTSTATIAAGNNGTARFYGTIEDSVCSIVPDDHKLEVDMGDIGAEKLKNNGTTTPKNFQIRLQDCVFDTQETMTTTFTGTVSSANSGNYYTIFNTDTGAAFNNVSLAIGDSLGTSYKSGMGIDQKIATDTATNKGKANENVNFKAWMVGARDAYDMGNFEANTTFQITYL

SEQ ID NO: 60350 - protein, 451 aa, Homo sapiens
MKDTWTVTAVKPKYQTYVVVIGESARRMPSVPLRVNGLIFADYIAASGSTQKSLGLTLNRVVDGKPQFQDNFVTLANRAGFQTWWFSNQGQIGEYDTAIASIAKRADEVYFLKEGNFEADKNTKDEALLDMTAQVLAQEHSQPQLIVLHLMGSHPQACDRTQGKYETFVQSKETSCYLYTMTHTDDLLGQLYDQLHKACRHEVFAAQNLKLSTVTTSGVNLSRTWQEVKGSDDAWFYTVFQLSGQAIMEQDERQESSKQISLLLPRTLLEQYFPHQKPICAERLDADLPMVQLSHRLLQESMNNPALSETESELRYRRWNAEAAGRYALNATEKLHNLYSNKKELFDGYHVTGVVLLRWQLLSAVMMFLASTLNIRFRRSDYVTCDGCPIRSLARNPCLTHHPMKNRLNCRIVSVDLRGYAPANFASMTTRIDCDRFFYPECFASRPTHEP

SEQ ID NO: 60351 - protein, 553 aa, Homo sapiens
  DOMAIN (1)..(147): RNA 3'-terminal phosphate cyclase domain identified by PFam, accession name RCT, E-value=1.7e-07, PFam score of -55.1
  misc_feature (1)...(553): Xaa = X or * as defined in Table 2
MRGEVLLAGVPRHVAEREIATLAGSFSLHEQNIHNLPRDQGPGNTVSLEVESENITERFFVVGEKRVSAEVVAAQLVKEVKRYLASTAAVGEYLADQLVLPMALAGAGEFTVAHPSCHLLTNIAVVERFLPVRFSLIETDGVTRQLLGVSYRILAMGHAEFLIQIADMRNDGGWRDFQFSGNLVMDEPNRSAQTYIKLVKSRLGTTKRYNHKDDCPRCRWIAAMIDNPPRIRKPTKSASVWHATATSASPERQMSTTVIMSARFISCWVMTPFCMPRSGPMRFVHLPCRFRDAFNTGVGKLDQLGPSMSTRIRQRFTTLCPMTLSSSSTEFENVSDCRPSRARSCLRFRLCRSIRCVYRLADYVQRSLQAGFIQRPAIRHPYHHVKGAFTEYVRNNRLPETVIRVLQPALARFSPDIAPLFSPFPLHDDDVTARLYAPSLMPKLRLIGLTLLALSATAVSHAEETRYVSDELNTWVRSGPGDHYRLVGTVNAGEEVTLLQTDANTNYAQVKDSSGRTAWIHVETTXHXAKPALPCARSGKSGQNPDRXTHQYR

SEQ ID NO: 60352 - protein, 80 aa, Homo sapiens
  misc_feature (1)...(80): Xaa = X or * as defined in Table 2
RASRLKTCGDGCCSLSAVVSVGASPFASRVKSSRRWVXSXVGPSSWPPGMSLXTAEIRRSRRIPVVSSGSLTASFANVVR

SEQ ID NO: 60353 - protein, 328 aa, Homo sapiens
MRVITLAGSPRFPSRSSSLLEYAREKLNGLDVEVYHWNLQNFAPEDLLYARFDSPALKTFTEQLQQADGPDCPPRRVTYAFTEYVRNNRLPETVIRVKQPALARFSPDIAPLFVHFRADDDVTARLYARARVYHASREQRRAVQGIGSFQRNCLMATLTTGVVLLRWQLLSAVMMFLASTLNIRFRRSDYVGLAVISSGLGFRLSQCALKLDTAFNRAGLTPRIVFTATDADVIKTYVRLGLGVGVIASMAVDPVADPDLVRVDAHDIFSHSTTKIGFRRSTFLRSYMYDFIQRFAPHLTRDVVDAAVALRSNEEIEVMFKDIKLPEK

SEQ ID NO: 60354 - protein, 143 aa, Homo sapiens
  DOMAIN (59)..(114): COMPONENT PHOSPHOTRANSFERASE SYST domain identified by eMATRIX, accession number PD02963D, p-value=2.200e-26, raw score of 24.36
MSDLMGGLLHFLNTIPPSMKFAAAFLVGAMLAFDMGGPINKTAWFFCFSLLEKHIYDWYAIVGVVALMRPSRREKEAASSAIVVGATVATEPAIPYALAAPLPMITANTLAGGITGVLVIAFGIKRLAPGLGIFDPLIGLMSP

SEQ ID NO: 60355 - protein, 174 aa, Homo sapiens
  DOMAIN (4)..(48): GTP1/OBG family proteins domain identified by eMATRIX, accession number BL00905B, p-value=1.000e-38, raw score of 19.00
  DOMAIN (1)..(170): GTP1/OBG family domain identified by PFam, accession name GTP1_OBG, E-value=1.4e-66, PFam score of 228.4
MLLADVGMLGMPNAGKSTFIRAVSAAKPKVADYPFTTLVPSLGVVRMDNEKSFVVADIPGLIEGAAEGAGLGIRFLKHLERCRVLLHLIDIDPIDGTDPVENARIIISELDNNYQPGSGDETALAEEAKQPEKVEFMWDDYHRQQLEEIAEEDDEDWDDDWDEDDEEGVEFIYK

SEQ ID NO: 60356 - protein, 234 aa, Homo sapiens
  DOMAIN (55)..(76): GTP1/OBG GTP-BINDING PROTEIN FAMILY SIGNATURE domain identified by eMATRIX, accession number PR00326A, p-value=2.543e- 17, raw score of 8.75
  DOMAIN (46)..(229): GTP1/OBG family domain identified by PFam, accession name GTP1_OBG, E-value=3.7e-79, PFam score of 271.0
DSDLDSVKQACHGVCRASLTLGPSGVSSQLDWVMGFGKTPTERIPLLELMLLADVGMLGMPNAGKSTFIRAVSAAKPKVADYPFTTLVPSLGVVRMDNEKSFVVADIPGLIEGAAEGAGLGIRFLKHLERCRVLLHLIDIDPIDGTDPVENARIIISELEKYSQDLATKPRWLVFNKIDLLDKAEEAKQPEKVEFMWDDYHRQQLEEIAEEDDEDWDDDWDEDDEEGVEFIYKR

SEQ ID NO: 60357 - protein, 40 aa, Homo sapiens
LVVWLTWRRTWWLPKTIVVPMKVSLMTPVIEGGDVKEPLR

SEQ ID NO: 60358 - protein, 720 aa, Homo sapiens
QGERVMYKTIIMPVDVFEMELSDKAVRHAEFLAQDDGDIHLLHVLPGSASLSLHRFAADARRFEEHLRHEAHERLQTMVSHFTIDPSRIKQHVRFSLTSIRTMQVLEHLGQDQCLKNKSLFPIPWGSFYAAPLLLLTLITLALLPLFLYITYRVGTIRREISKSTQRSLADMSALTEETLSVSGMLLTKAFGRQTRHNKSVQDYLKVLKEKNAQQPSAESAPGVAIAPGGRPVCTYAQTKVYSFGLPSIFTFMQTIPSTGIDFTVWASVIGGVIAIGCAFVVALYRYRFRGKPFVSGMLFVVMMSPDIVMAISLLVLFMLLGIQLGFWSLLFSHITFCHSSLSISSEASPAPDNEPTDQADQVDPTRCHVIPKAITSTPVCRPSMAVIIGNGAARALFFLSGKQFGRNERRKTRRDGRHQRDNADDGVPVINVFFQHEKQKNQAVLLMGPPISNASIAPTRNAAANFIDGGMIANQKRRSESRFIGNRRGNISAHDGDHKGEAKVTDGFNYPVFTEVRGDWRFDDGAIRLRHQTTHTSKLTNLCRRTTAAPLLDAYTRPCVILCLVKTLVDSRGCRLTASLVAIACWGSTAGFSRIRRASIQLSVDVTRLRLAPTVRFELADEAGIRLTSRARLSTRVSIRTHGAYTQRNEPFEAKVPVDPLKKKIASVFLESFLFYSGLAADTARIKVDLPAFGIPNIPTSASSISSSSSSRLSIAISP

SEQ ID NO: 60359 - protein, 19 aa, Homo sapiens
QGPGACTHSGFCRFGFNRR

SEQ ID NO: 60360 - protein, 882 aa, Homo sapiens
  DOMAIN (251)..(567): REJ domain identified by PFam, accession name REJ, E-value= 6.5e-166, PFam score of 564.6
MTDLYALAQECSLYDLDASRYCMDDLQVLSVSTVASAVGARVPHIPNCCRHNQSLPIPSPTPAGNRVQEHVLNARVREQRMQVGKGKAPGAPIFYISEPSTYQVPRCAQSWTPAFARQQQTQHYSLPSRHCYDPRLADLTIQRYPCLLQILKASPSVLAKEALEGLHIMPVIHLQGGSKRGIYGPWEAPPVGGAQMRGLRDGAQAPVSQTGCCKCADLLWGTVGPPQQPSTTSPGSGRPLGGKGPSPRSQVLIRSGRVPIVSLECVSCKAQAVYEVSRSSYVYLEGRCLNCSSGSKRGRWAARTFSNKTLVLDETTTSTGSAGMRLVLRRGVLRDGEGYTFTLTVLGRSGEEEGCASIRLSPNRPPLGGSCRLFPLGAVHALTTKVHFECTGWHDAEDAGAPLVYALLLRRCRQGHCEEFCVYKGSLSSYGAVLPPGFRPHFEVGLAVVVQDQLGAAVVALNRSLAITLPEPNGSATGLTVWLHGLTASVLPGLLRQADPQHVIEYSLALVTVLNEYERALDVAAEPKHERQHRAQIRKNITETLVSLRVHTVDDIQQIAAALAQCMLIQASAVLDLTEDDFDFLTSNKVWIATDRSRARRCVEACVYAKHSNLEMAEMVTKAGHGVRTKLGDRHHSDSASVVVTGHPCDDHQLYTQTATVVFGGAHCDKKLRTLITGYRNWPTRITSLEKNINDLMELKNTARELREAYTSIDSRIDQAEEKISEIEDQLNEIKREEKIREERMKRNEQSLQEIRDYVKRPNLHLTGVPESDWENGTNLENTIQDIIQENFPNIARQANIQIQKIRRTSQRHFLRRARHIIIRFTKVEMKEKMLRAARKKGQVTHKGKSIRLSADFSAETLQARREWGPIFNMMNRSSYST

SEQ ID NO: 60361 - protein, 84 aa, Homo sapiens
IRSNSSEFMVCASPSTRSSSLITAMANGAFSEMWCAICKVKSSSSSTSTTWLRMPTASARWAVIGEAVKISSLTMWKPASRVRL

SEQ ID NO: 60362 - protein, 99 aa, Homo sapiens
SINRCWSFCAILRSIAVTIISKASTCAHSSFDSSSFWASLNNNSAMRFFMSVFPYPKYGEVNIMFHNFIVSGSIIFMTKEILCANIFCLITSETFLLFK

SEQ ID NO: 60363 - protein, 34 aa, Homo sapiens
YKQAPALVDNVLRMFMPDENITKLIHQTNELSVM

SEQ ID NO: 60364 - protein, 315 aa, Homo sapiens
DVTILARAVLQALLKILYHKCEFNDEMLTEGVIREKMGFNPQTLREVLQACQQQGCVANNLDLDVVMIIIDGAFSGIVQNWLMNMAGYDLYKQAPALVDNRTGMERASNGGPWQVQSLPARSYRQLDSYYGEAMAIGERALVALLDFSGPSPSGDWRYQTHHTFPPTGWRRQATLVKMRACIEAVKAVGEELCPALGLTIPVGKDSMSMKTRWQEGNEEREMTSPLSLVISAFARVEDVRHTITPQLSTEDNALLLIDLGKGNNALGATALAQVYRQLGDKPADVRDVAQLKGFYDAIQALVAQRKLLAYHDRLI

SEQ ID NO: 60365 - protein, 313 aa, Homo sapiens
  DOMAIN (18)..(65): Bacterial regulatory proteins tetR family proteins. domain identified by eMATRIX, accession number BL01081, p-value=1.000e-29, raw score of 28.63
  DOMAIN (18)..(64): Bacterial regulatory proteins, tetR family domain identified by PFam, accession name tetR, E-value=1.9e-18, PFam score of 74.7
LIMAKRTKAEALKTRQELIETAIAQFAQHGVSKTTLNDIADAANVTRGAIYWHFENKTQLFNEMWLQQPSLRELIQEHLTAGLEHDPFQQLREKLIVGLQYIAKIPRQQALLKILYHKCEFNDEMLAEGVIREKMGFNPQTLREVLQACQQQGCVANNLDLDVVMIIIDGAFSGIVQNWLMNMAGYDLYKQAPALVDNVLRMFMPDENITKLIHQTNELSVIVMRRDIQPSKHHLMYGSFADERVIEQHIEAGISLCDAVNFLVEKYALVRTDQPGFSACTRSQLINSIDILRARRATGLMTRDNYRTVNNIT

SEQ ID NO: 60366 - protein, 85 aa, Homo sapiens
SDAWRAGRTDAAAWSVGCRTGCRFHQHQQHHRHRLSLAAEPEHPAGTGALCLCVRHLYRNGQTAVRPGGRRSHACMQVASRRSSL

SEQ ID NO: 60367 - protein, 94 aa, Homo sapiens
  misc_feature (1)...(94): Xaa = X or * as defined in Table 2
STPIEKTVSKAFSAGSCSILTVTNARASARSACIISITAAVSGSCAPTPXEVSSAFARSLICRSIRKPGLKLRSITIGALASKTVLPASPPRIA

SEQ ID NO: 60368 - protein, 42 aa, Homo sapiens
ICTVSQFQIFINNSPKTTLIQREYWFPLCSSDSLKQGFLLHS

SEQ ID NO: 60369 - protein, 497 aa, Homo sapiens
  DOMAIN (423)..(457): Hydrogenases expression/synthesis hypA family proteins domain identified by eMATRIX, accession number BL01249B, p-value=9.419e- 30, raw score of 19.74
  DOMAIN (382)..(495): Hydrogenase expression/synthesis hypA family domain identified by PFam, accession name HypA, E-value=1.3e-72, PFam score of 254.6
MLIPSKLSRPVRLDHTVVRERLLAKLSGANNFRLALITSPAGYGKTTLISQWAAGKNDIGWYSLDEVPVHPVPPPFDQPVLPSPESPHWHHFLAQRPCNPGVTFSPLGGCNHRFHRSFATVGNRNRNCLHHLHNRSCERQLCADAVRSIQRIRQILNMQINTEARLEVAVHHHRRFGIQHGTARQSTANCLINQPAYTTGSQPMITLLLIACPLLPFIIMAICKGDRLPSRSRGAAWVCGYDHEKSMVITAHGFAMPVKQAFAPVLKLRKWLNPVSLVPGWQCEGSALLFRRMALVELAEYRDIIKLLGRQSVGPDASGWVFRLTPYVMVGVMLTIATALPVVTVGSPLPQLGDLITLLYLFAIARFFFAISGLIPLMGGDMHEITLCQRALELIEQQAAKHGAKRVTGVWLKIGAFSCVETSSLAFCFDLVCRGSVAEGCKLHLEEQEAECWCETCQQYVTLLTQRVRRCPQCHGDMLQIVADDGLQIRRIEIDQE

SEQ ID NO: 60370 - protein, 150 aa, Homo sapiens
  DOMAIN (80)..(97): Zinc finger, CCHC class domain identified by PFam, accession name zf-CCHC, E-value=0.00035, PFam score of 27.3
SSNPLSRPPLPTPVTPCPLLRLSLLRACCCCLFLPLRFFSCPLLCFLLCFFFSVCSPAHKNFKMPKPQWSGIPTGPPPSGSCFKCQKSGHWAKECLQPRIPPKPCPICVGPHWESDCPARLAATPRAPGTLAQGSLTDSFPDILGLAAED

SEQ ID NO: 60371 - protein, 112 aa, Homo sapiens
IMPANARSHAVLTTESKVTIRGQTTIPAPVREALKLKPGQDSIHYEILPGGQVFMCRLGDEQEDHTMNAFLRFLDADIQNNPQKTRPFNIQQGKKLVAGMDVNIDDEIGDDE

SEQ ID NO: 60372 - protein, 179 aa, Homo sapiens
  DOMAIN (124)..(160): HlyD family secretion proteins domain identified by eMATRIX, accession number BL00543A, p-value=1.360e-09, raw score of 19.82
DDCYRSRDAFPGIISQGGKMTNLTLDVNIIDFPSIPVAMLPHRCSPELLNYSVAKFIMWRKETGLSPVNQSQTFGVAWDDPATTAPEAFRFDICGSVSEPIPDNRYGVSNGELTGGRYAVARHVGELDDISHTVWGIIRHWLPASGEKMRKAPILFHYTNLAEGVTEQRLETDVYVPLA

SEQ ID NO: 60373 - protein, 230 aa, Homo sapiens
  DOMAIN (175)..(211): HlyD family secretion proteins domain identified by eMATRIX, accession number BL00543A, p-value=1.360e-09, raw score of 19.82
MGLPVMWSLEEADVQQVLDGKIMKNAGVPLSPFTPPAPGQAPSLPSELALSGKGASRRPLAQLAHGKNTIASAIPNSWFRSKRSSANMGRFDLPEKHTWSSATLQTASESFRKVNSPLVKWLFIVEPGFALGQSDCRAAPLNPKGGTVSEPIPDNRYGVSNGELTGGRYAVARHVGELDDISHTVWGIIRHWLPASGEKMRKAPILFHYTNLAEGVTEQRLETDVYVPLA

SEQ ID NO: 60374 - protein, 271 aa, Homo sapiens
  DOMAIN (214)..(230): OLFACTORY RECEPTOR SIGNATURE domain identified by eMATRIX, accession number PR00245C, p-value=7.000e-16, raw score of 7.84
  DOMAIN (17)..(144): 7 transmembrane receptor (rhodopsin family) domain identified by PFam, accession name 7tm_1, E-value=0.00098, PFam score of 14.0
FADQLPAIPSQWRMIAVAICNPLLYHIAMSPTVCSSLMFGSYLMAFSGAMAHTGCMLRLTFCDANTIDHYFCDILPLLQLSCTSTYINELVVFTVVGINIIVPTVTIFISYGFILSSILHISSKEGRSKAFSTCSSHIIAVSLFCDANTINHYFRDILPVFQLSCTSTYINELVVFIVAGINTIVPTVTVFISYGDILSRILHISSNEGRSKAFSTCSSHIIAVSLFFCDANTIHPYLCDILPLLQLSCTGTYINELVVSTAAVIIFHCHH

SEQ ID NO: 60375 - protein, 221 aa, Homo sapiens
  DOMAIN (121)..(152): NADH-ubiquinone/plastoquinone oxidoreductase chain 4L domain identified by eMATRIX, accession number PF00420A, p-value=7.639e- 09, raw score of 16.63
  DOMAIN (132)..(171): NADH-Ubiquinone/plastoquinone (complex I) domain identified by PFam, accession name oxidored_q1, E-value=7e-06, PFam score of 24.3
MSYSVMFALLLLTPLLFSLLCFACRKRRLSATRTVTVLHSLGITLLLILALWVVQTAADAGEIFAAGLWLHIDGLGGLFLAILGVIGFLTGIYSIGYMRHEVAHGELSPVTLCDYYGFFHLFLFTMLLVVTSNNLIVMWAAIEATTLSSAFLVGIYGQRSSLEAAWKYIIICTVGVAFGLFGTVLVYANAASVCGTDHGGRMMRSWNGGQLISKLLAITPG

SEQ ID NO: 60376 - protein, 87 aa, Homo sapiens
  DOMAIN (40)..(65): Met Apo-repressor MetJ. domain identified by eMATRIX, accession number PF01340C, p-value=5.500e-32, raw score of 12.07
  DOMAIN (1)..(87): Met Apo-repressor, MetJ domain identified by PFam, accession name MetJ, E-value=7.5e-40, PFam score of 145.8
SSCVLVRWRETADCRWRKLCLTDERTRRNNLRHATNSELLCEAFLHAFTGQPLPDDADLRKERSDEIPEAAKEIMREMGINPETWEY

SEQ ID NO: 60377 - protein, 155 aa, Homo sapiens
  DOMAIN (107)..(132): Met Apo-repressor MetJ. domain identified by eMATRIX, accession number PF01340C, p-value=7.609e-31, raw score of 12.07
  DOMAIN (50)..(155): Met Apo-repressor, MetJ domain identified by PFam, accession name MetJ, E-value=6.4e-65, PFam score of 229.1
  misc_feature (1)...(155): Xaa = X or * as defined in Table 2
NYMHYHADRCITRCHGNACTVNYAGLRSVPTSTVWTGLNLLTKRIKYLMAEWSGEYISGPCVEPGKKSDQSKKITVSIPLKVLKILTDERTRRQVNNLRHATNSELLCEAFLHAFTGQPLPDDADLRKERTAEIPEAAKREHAXHGGLTPETWEY

SEQ ID NO: 60378 - protein, 299 aa, Homo sapiens
  DOMAIN (196)..(225): Met Apo-repressor MetJ. domain identified by eMATRIX, accession number PF01340A, p-value=1.375e-37, raw score of 7.96
  DOMAIN (196)..(299): Met Apo-repressor, MetJ domain identified by PFam, accession name MetJ, E-value=7.8e-88, PFam score of 305.2
MKLIIKRVSNSGHDLANILRLATSTQCKKWLDAVVHACNPNISGGQAGYSDRCYVMGWPAFLHTRGRKCDVRHLLFGVGSCSFLGSFAERRNISHCSADIIFRLVTLFVIFLCRLWIPLLVIHSFGIGRSFPPSIHSIRECICGFSPRQSIRTVREVQSTSHGNAARKQAGLRSGPTSTVCPGPNLLTKRIKYLMAEWSGEYISPYAEHGKKSEQVKKITVSIPLKVLKILTDERTRRQVNNLRHATNSELLCEAFLHAFTGQPLPDDADLRKERSDEIPEAAKEIMREMGINPETWEY

SEQ ID NO: 60379 - protein, 78 aa, Homo sapiens
LVVLRIELFDFLVTLLRVFPRCIVFIFKEESAIAGIFRIDIQFTGSNRPAHHRSRSELHFIHRRYAVAFQHLQNDIAE

SEQ ID NO: 60380 - protein, 84 aa, Homo sapiens
PAHFSVAHSHLWQNINPLSSVQCRQNHQAIPCRIFELLNVMRHVTRDSSSGLGCSWRLTASVNARRFVDPVQILVMAMSGRRSR

SEQ ID NO: 60381 - protein, 665 aa, Homo sapiens; identical to SEQ ID NO: 54844
  DOMAIN (327)..(370): Pyridine nucleotide-disulphide oxidoreductases class-II activ domain identified by eMATRIX, accession number BL00573C, p-value= 5.091e-39, raw score of 27.64
  DOMAIN (305)..(450): Pyridine nucleotide-disulphide oxidoreducta domain identified by PFam, accession name pyr_redox, E-value=5e-28, PFam score of 97.5

SEQ ID NO: 60382 - protein, 29 aa, Homo sapiens
RLVRPTICCPHLPLGFLKYGMYIAGGTQD

SEQ ID NO: 60383 - protein, 234 aa, Homo sapiens
  DOMAIN (66)..(109): kw TRANSCRIPTASE REVERSE II ORF2 domain identified by eMATRIX, accession number DM01354T, p-value=9.039e-12, raw score of 9.48
MNRAVYGDPHRELLLQELPQEHTRKAEKVHRPFEGGGLPLQAPWDSRGTQVLESMADRPEDGSYHGILQILPSTSPEPSSSTGWPVLEVLARKIRQEKEIKDIQTSKEEVKLLLFADDMTVYLENPKDSSRKFLELRAGKGGEKIKKSDGCRVCVEGVRKVWAHEPLLIGHMDALTEDFESEGVKQDTKGIGLPVAVAPILTTHFMSEHFDITKHQTRSRTLQESVQGHTAIEE

SEQ ID NO: 60384 - protein, 35 aa, Homo sapiens
  misc_feature (1)...(35): Xaa = X or * as defined in Table 2
DGLLLMDERNISPLLQKRMPTXQAVXVWWWKDYGV

SEQ ID NO: 60385 - protein, 61 aa, Homo sapiens
  misc_feature (1)...(61): Xaa = X or * as defined in Table 2
QWVPIARPNMPACHVQRRTSSLERRQPVMLMVMLRILWYIYCSIHVLGXWICRLYYKTLLK

SEQ ID NO: 60386 - protein, 364 aa, Homo sapiens
  DOMAIN (190)..(217): INTERLEUKIN-1 SIGNATURE domain identified by eMATRIX, accession number PR00264B, p-value=5.359e-11, raw score of 20.98
  DOMAIN (149)..(215): Interleukin-1 domain identified by PFam, accession name interleukin-1, E-value=0.0014, PFam score of 17.1
QESDFMLGTSLGPVTRKDMDRCPPSLVDVESNKYLQLWSLIHTDAHAHHGKKRGSGPLVDLGKAVPSEEQEKLPAGEDKLAGQENQQNPVHPEQGSQMGRDRRQQKDKEDPDHVGLPPHHHLIYLVLFTKGSEDIMNPQREAAPKSYAIRDSRQMVWVLSGNSLIAAPLSRSIKPACRDTEFSDKEKGNMVYLGIKGKDLCLFCAEIQGKPTLQLKLQGSQDNIGKDTCWKLVGIHTCINLDVRESCFMGTLDQWGIGVGEEQILLSIPQVDNSEMRSFFMVPQRIPAVLRHNHPWQGTEHEQEIDSQPILHHTTCALCQRSEDIVMVKEEEEEEKPQKDSRVGLQPDKQCWGQTSLVPRGAPS

SEQ ID NO: 60387 - protein, 44 aa, Homo sapiens
DRSPPLMSHGPHLKHMSTFCRKCGRKFYFFLGSYMCWSQLGFCY

SEQ ID NO: 60388 - protein, 397 aa, Homo sapiens
LADCSRYNGLEMTLSCCAGASTDAVGGIERGGLKSPEASEGEIAPRLLLDGEPLALSGDKWRISPWLLVTDDTATITAFLQMIQEGKAITLRDGDQTISLSGLKAALLFIDAQQKRVGSETAWIKKGDEPPLSVPPAPALKEVAVVNPTPTPLSLEERNDLLDYGNWRMNGLRCSLDPLRREVNVTALTDDKALMMISSQIFNGHMVHIIKDLVFTDHAPDKGISFGSDTGMDRPARGDHRLLVMHHDMTRFLRLPHHVENAGVIIHIEIEINFHPALVGVTRHGVPLVTRSQLRQPHTRLAGFQYIRDQIFVNRATVTGEEIAYAELFTNFPANGNRFSYRHNAANNNSVNVAVNHGVLIGDKYLFNQKFIAQPLGIQRFCVRTVDALSYVHINLR

SEQ ID NO: 60389 - protein, 351 aa, Homo sapiens
STQQHMKQWFNSTDKPRTGTLGSTKASKTTSALYNNCGPIKVLEIPDLRQRSLMHIWAMKRILGPSPWRMILMRRVPLNPALVGECGSNPHTCLNRFQDSLRFRITVLHPIYVPTGRCKQRAGSSGVRSSDPPEARRTIGETHDTDETDHNRTWTFQRYFAGIDSANTNFVLANTEPTHIFVWTRAAYNNNNETAWIKKGDEPPLSVPTAPALKEVAVVNPTPTPLSLEERNDLLDYGNWRMTGLRCSLDPLRRESPDGGNVHAPSYTLTCIDRQSTQFESITHTLPMTYNHYSMVAHYRSRSPSDPNPSQGVIHRPPRMHQPFHCLHSQRHHILVLIAAMSPSEVFGLSS

SEQ ID NO: 60390 - protein, 318 aa, Homo sapiens
MLIRLWLDKVQDKANFRSMLTSQQDENDNPVPDALQVTDEEYERWQKEIGEITLPDHVFELIFMLRQQLDKLPDAPYVSDRRWKKAIRLLQASAFFSGRSAVAPVDLILLKDCLWYDAQSLNLIQQQIDVLMTGHAWQQQGMLTRLGAIVQRHLQLQQQQSDKTALTVIRLGGIFSRRQQYQLPVNVTASTLTLLLQKPLGYRARDRNFGQFAQRMQLGKLRFIVGVLNRTGAQTVAQRQRNVISGTDFTNFAEVLIEEIFLMMGEAPFRHNRTAARDDTGQAFRGHRHIAQQYARMDSEVIHTLLGLFQQRVAERFP

SEQ ID NO: 60391 - protein, 29 aa, Homo sapiens
TARRLLFFREQLRVLPYQMPRWFCLFHCR

SEQ ID NO: 60392 - protein, 732 aa, Homo sapiens
  DOMAIN (347)..(359): 4Fe-4S ferredoxins iron-sulfur binding region proteins. domain identified by eMATRIX, accession number BL00198, p-value= 5.714e-11, raw score of 10.43
  DOMAIN (129)..(330): IMP dehydrogenase / GMP reductase C terminus domain identified by PFam, accession name IMPDH_C, E-value=2.2e-62, PFam score of 220.7
MTYLALGTPELHMRIEEDLKLGFKDVLIRPKRSTLKSRSDVELERQFTFKHSGQSWSGVPIIAANMDTVGTFSMASALASFDILTAVHKHYSVEEWQAFINNSSADVLKHVMVSTGTSDADFEKTKQILDLNPALNFVCIDVANGYSEHFVQFVAKAREAWPTKTICAGNVVTGEMCEELILSGADIVKVGIGPGSVCTTRVKTGVGYPQLSAVIECADAAHGLGGMIVSDGGCTTPGDVAKAFGGGADFVMLGGIVAGHEESGGPIAERDRRQFLLFLRLSPESAMNAPWRGSSLRAEGEFPDVKYRFFRKSCQHCDHAPCVDVCPTGASFRDAASGIVDVNPDLCVGCQYCIAACPYRVRFIHPVTKTADKCDFCRKTNLQAACPTKALTFGNLDDPNSEISQLLRQKPTYRYKLALGTKPKLYRVPFKYGEAGGADSTLLRTTLIVGPGAVILGLLILVFHLTRPWTFWKLMFHYSFTSVMSMGVMLFQLYMVVLVLWLAKIFEHDLLAPATTLVAEAGDRAKVLSLLTPVHRGLETLMLQGMLTRLGAIVQRHLQLQQQQSDKTALTVIRLGGIFSRRQQYQLPVNVTASTLTLLLQKPLKLHDMEVVHISFERSALEQWLSKGGEIRGKLNGIGFAQKLNLEVDSAQHLVVRDVSLQGSTLALPGSSAEGLPGEIKQQLEELESDWRKQHALFSEQQKCLFIPGDWLGRIEASLQDVGAQIRQAQQC

SEQ ID NO: 60393 - protein, 195 aa, Homo sapiens
MLKKREQTVFTHEKSVFQGLDRGNRELGPPKTFGVKGAQKGNLQIFSEDKNFGPGGSGEIWGHRGPKWDIPRGKRETLGKPHFFWKPSQEFGRKGLGSFGPWERVSGNKNSGKRIYPWGPVDGINCRWREPRNVDVAEYRRDCGSRFRSLRHFYRSLFSLHRPASTRHQKAQSSAVTVLQTNAQHGRRQRWQKHQ

SEQ ID NO: 60394 - protein, 113 aa, Homo sapiens
  misc_feature (1)...(113): Xaa = X or * as defined in Table 2
FQASTTQPRTCCAPLSSVWRCRPPRSSPWPASWRSVPSSMGLRRTPWCPELLSSRGSTGFLWAEMTSSQARPKSSPCLWTSSLAPASRPCPSXLQPPGQQRWGEPIGAIAVPL

SEQ ID NO: 60395 - protein, 193 aa, Homo sapiens
  misc_feature (1)...(193): Xaa = X or * as defined in Table 2
RHKHRRRIPGRWDQIRPAPNRWQTGFQWFALPVTGVRLISGYTELLPRLPAQKNLPYTIHPAWRFVAHQGRESALECRYVPLPVRHXRNCRWREPRNVDVAEYRRDCGSRFRSLRHFYRSLFSLHRPASTRHPGAQTGAVTGFADECPARKAAALAKASVNKVVFHSTNATVCHRPDRSRRASGSFRRYWRQE

SEQ ID NO: 60396 - protein, 83 aa, Homo sapiens
LLGPTVVLMESLYCRQLYSMQLAALWEMWLNILDVPIHVACPLVQPCSQFLLVPVAPNRALLSATIFIQFLLEHHNEDSIATH

SEQ ID NO: 60397 - protein, 55 aa, Homo sapiens
  misc_feature (1)...(55): Xaa = X or * as defined in Table 2
KKIKRHSLSVINSLANSKNKRRWRKNIKLRXSSLLKXTESPLPMAILVLTSLTAI

SEQ ID NO: 60398 - protein, 128 aa, Homo sapiens
  misc_feature (1)...(128): Xaa = X or * as defined in Table 2
IWTGKKVDSARALIARGWGLHVILRRTDDWMDGRRSRHTDDTDVLLRIHHVIGELPTYGYRRVWASSQTGRTXXFKVQNRYFPPVLSDFEHLQEPYEYFGKLRXPWLPATGEFHAEIYRSVDFCKHPV

SEQ ID NO: 60399 - protein, 456 aa, Homo sapiens
LTIDGDPFLPSSLFPKENRFSPSPQAGYMDWHIQYVEPHFPKGSQLHVIELTAIKTLGCIATDYGSSPSPDRSPGPAHYYWTDHSTANIRYQVAAIGEITLPDHVFELIFMLRQQLDKLPDAPYVSDRRWKKAIRLLQASAFFSGRSAVAPVDLILLKDCLWYDAQSLNLIQQQIDVLMTGHAWQQQGMLTRLGAIVQRHLQLQQQQSDKTALTVIRLGGIFSRRQQYQLPVNVTASTLTLLLQKPLKLHDMEVVHISFERSALEQWLSKGGEIRAKLERNTMSDMAAFEKLATPIEYNHVEYFSNVKPYLFADVINKFMAHDEQEEHTVGPGIWIPEGLPRGWRVKIGRRVQPVRNAHFASELPGMLGTRTAPKMPGDPNLDLIHSSQVLNMGLAEQFQLNETLHGSPGLGLWVPCPSCQPRFTAEDKSQQKMECNENTDRPFKVMELGGLPFVA

SEQ ID NO: 60400 - protein, 54 aa, Homo sapiens
SQKCANATAGKDGATNQRDAALKGSIIVPNCPGVRATFGTWRLKARSLESELRG

SEQ ID NO: 60401 - protein, 1310 aa, Homo sapiens
  DOMAIN (224)..(259): SYNTHASE I PSEUDOURIDYLATE PSEUDOURIDINE LYASE TR domain identified by eMATRIX, accession number PD02906C, p-value=9.357e- 30, raw score of 24.17
  DOMAIN (172)..(365): tRNA pseudouridine synthase domain identified by PFam, accession name PseudoU_synth_1, E-value=3.3e-99, PFam score of 343.0
  misc_feature (1)...(1310): Xaa = X or * as defined in Table 2
KPFSPCCRKGRWLFRNHSSARRPTVLYYRRSTMRXNSWXPNLRRQRGNPANRSRQSMLELSGVKDGELIPAKLFNHLVTWLQARQTLSQQNTPRPGGGEIPPWCSSVLAESERKKRGRKKQRGIDSPDVGALLLVRATFYIWQQPPVNKIALGIEYAASKYYGWQRQNEVRSVQEKLEKALSQVANEPITVFCAGRTDAGVHGTGQVVHFETTALRKDAAWTLGVNANLPGDIAVRWVKTVPDDFHARFSATARRYRYIIYNHRLRPAVLSKGVTHFYEPLDAERMHRAAQCLLGENDFTSFRAVQCQSRTPWRNVMHINVTRHGPYVVVDIKANAFVHHMVRNIVGSLMEVGAHNQPESFPPGTPGTPFGPEGGRIPGALHNDTGKGSGAPKTWPRQADKHHRRSDQKQHVYHQHHWNIPGEEQALQGADEITSGNNVRHRADHRGHTVDLKNKAGKHNRRQKSGVQGDLSGIELVAGPYPYCYLYRDANDLANEGITLRFILQLCLAAWRCLFSSSSLNSTPDTNMWICLLRAAAHLLTQKMKDRTMLQHYSVSWKKGLAALCLLAVAGLSGCDQQENAAAKVEYDGLSNSQPLRVDANNHTVTMLVQINGRFLTDDTRHGIVFKDGSNGHKSLFMGYATPKAFYEALKEAGGTPGENMTMDNKETTHVTGSKLDISVNWQGAAKAYSFDEVIVDSNGKKLDMRFGGNLTAAEEKKTGCLVCLDSCPVGIVSNATYTYVLYLGFSIHRNVNRLPAKWVNSRSFPVRSDLLGVVSPGLKRTDSLPANLLATALCVLAWGYFLHQGVVDPLGGINTLWPLFGIANQMLAGMALMLCAVVLFKMKRQRYAWVALVPTAWLLICTLTAGWQKAFSPDAKVGFLAIANKFQAMIDSGNIPSQYTESQLAQLVFNNRLDAGLTIFFMVVVVVLALFSIKTALAALKDPKPTAKAQGFVKKVKGNGILPVQLYFIASLRITSVQRETAETADFDTLAVRKSRGHMLQHLFYCIFNRLGGNVRLPGFVFRTNRQADCAVFTINAGEFSFNFVANAQNQGSVFNAGDPLSHLSMQPGLWNAEMQLNEKGYYFAVLVLGLFSAASYQKTVRDKYEGIPTTSIYYMTCLTVFIISVALLMAQRKTPSCLAVEQWQQRGIRVGSYRGDMVPFWRNSPDVQIIVTDDGLQHYRLARDVEIVVIDGVRRFGNGWWLPAGPMRERAGRLKSVDAVIVNGGVPRSGEIPMHLLPGQAVNLRTGTRCDVAQLEHVVAMAGIGHPPRFFATLKMCGVQPEKCVPLADHQSLNHADVSALTRSHSVV

SEQ ID NO: 60402 - protein, 454 aa, Homo sapiens
  DOMAIN (286)..(298): D-ALA-D-ALA CARBOXYPEPTIDASE 1 (S11) FAMILY SIGNATURE domain identified by eMATRIX, accession number PR00725A, p-value=6.891e- 09, raw score of 9.01
MYDVATNSLTPDATYENNDWKRVVDDKVFQSGVFNVALNNGSEWDTTGRSIVDTLTVNNGSQVNVSESKLTSDTIDLTNGSSLNIGEDGYVDTDHLTINSYSTVALTESTGTGLTVRVNDNVRGLYAAKSTAGIAAMSHQVQNDSIRTDQRASVIDISGTFVNWCSVHYVNRTSFAFAGMTPAMAKAMRPSQMLYIQLPPLKRSLLFSAVLCAASLTSVHAAQPITEPEFASDIVDRYADHIFYGSGATGMALVVIDGNQRVFRSYGETRPGNNVRPQLDSVVRIASLTKLMTSEMLVKLLDQGTVKLNDPLSKYAPPGARVPTYNGTPITLVNLATHTSALPREQPGGAAHRPVFVWPTREQRWKYLSTEKLKAAPGSQAAYSNLAFDLLADALANASGKPYTQLFEEQITRPLGLKDTTYNPSPDQCRRFMVAERETVVQKGGEMATERNTR

SEQ ID NO: 60403 - protein, 480 aa, Homo sapiens
  DOMAIN (402)..(426): Transposases IS30 family, proteins. domain identified by eMATRIX, accession number BL01043C, p-value=6.516e-24, raw score of 13.19
MSLNDAGTLVSNFWMSYMVGMWAFSFILRFFDLQRILTVLAGLAAILMYVFNTGTPAHMAWSILALGFFSSAIYTTIITLGSQQTKGRRILWKTPQRSAAFTYRFQGHLYLALVHTTGLLALTLVSLSLRWYIRVITGPLEDETEFPSRQQGRLGSESQVDSRYQLMTMYYEFRARVPGLERMWQHNSVSGKKGLAALCLLAVLGLAAAINKRMRRQKWNTTDFRTANRCVSMPITIRNIPVTVERQLYRLIPGEEEMSFILQPVTSNEIDSDALYLDEITLTSEQDAVLRYGQVEVPLPPGADVERTTWGISVNKPNAAKQQGQLLEKARNEMGELAYMVPVKELTGTVTFRHLLRFSQKGQFVLPPARYHLRRSHSLRHGRRHTRKGERGTINIVNGTPIHERSRNIDNRRSLGHWEGDLVSGGVGTVIGVVTGVIIFTVINYGLTYIGVNPYWQYIIKGAIIIFAVALDSLKYARKK

SEQ ID NO: 60404 - protein, 38 aa, Homo sapiens
  misc_feature (1)...(38): Xaa = X or * as defined in Table 2
YESARLSGLHRQSDDRWRRXSPQYARHTRKRTSAGCSA

SEQ ID NO: 60405 - protein, 408 aa, Homo sapiens
  DOMAIN (17)..(33): GLYCERALDEHYDE-3-PHOSPHATE DEHYDROGENASE SIGNATURE domain identified by eMATRIX, accession number PR00078E, p-value=6.727e- 12, raw score of 10.50
  DOMAIN (1)..(47): glyceraldehyde 3-phosphate dehydrogenase domain identified by PFam, accession name gpdh, E-value=4e-15, PFam score of 53.1
KVTAEEVNNALKQATTNNESFGYTDEEIVSSDIIGSHFGSVFDATQTEITAVGDLQLIFMQAMFTICAANTGFTPSGVEALHSFEVFTVDPNCWTHFAYEQTLWQSDPETPLKVYQLLSGAHYRTSPLDLRRMMDAPVQHFLQAAGENEIAGALWLVDEGGLSQQLSQAVWAGFRRPRGNLVAQSLAAHGNNPLAATLRGRRVSRIAVHPARQREGTGRQLIAGALQYTQDLDYLSLWRFWQRCGFVLVRMGNHREASSGCYTAMALLPMSDAGKQLAEREHYRLRRDAQALAQWNGETLPVDPLNDAVLSDDDWLELAGFAFAHRPLLTSLGCLLRLLQTSELALPALRGRLQKNASDAQLCTTLKLSGRKMLLVRQREEAAQALFALNDVRTERLRDRITQWQLFH

SEQ ID NO: 60406 - protein, 27 aa, Homo sapiens
NSTLKLWRFAKRLLFGFCPGFTRAIMP

SEQ ID NO: 60407 - protein, 209 aa, Homo sapiens
  DOMAIN (63)..(85): SUGAR TRANSPORTER SIGNATURE domain identified by eMATRIX, accession number PR00171D, p-value=8.953e-15, raw score of 12.76
MWGTVIVGLTNVLATFIAIGLVDRWGRKPTLTLGFLAMAAGMGVLGTMMHIGIHSPSAQYFAIAMLLMFIVGFAMSAGPLIWVLCSEIQPLKGRDFGITCSTATNWIANMIVGATFLTMLNTLGNANTFWVYAALNVLFILLTLWLAVMRRLREKLAQANLKLGRNYPEPKLSYTQRGTSAGTAWLESYEIRLNPVLLLENSEAFIEEV

SEQ ID NO: 60408 - protein, 286 aa, Homo sapiens
  DOMAIN (148)..(170): SUGAR TRANSPORTER SIGNATURE domain identified by eMATRIX, accession number PR00171D, p-value=8.953e-15, raw score of 12.76
  DOMAIN (1)..(247): Sugar (and other) transporter domain identified by PFam, accession name sugar_tr, E-value=5.7e-13, PFam score of 56.5
RSVQRVLLRLRDTSAEAKRELDEIRESLQVKQSGWALFKENSNFRRAVFLGVLLQVMQQFTGMNVIMYYAPKIFELAGYTNTTEQMWGTVIVGLTNVLATFIAIGLVDRWGRKPTLTLGFLAMAAGMGVLGTMMHIGIHSPSAQYFAIAMLLMFIVGFAMSAGPLIWVLCSEIQPLKGRDFGITCSTATNWIANMIVGATFLTMLNTLGNANTFWVYAALNVLFILLTLWLVPETKHVSLEHIERNLMNGRKLRELGLRIISQDVDATPHHLHFAVWRITLALAIT

SEQ ID NO: 60409 - protein, 156 aa, Homo sapiens
  DOMAIN (119)..(134): FecCD transport family domain identified by eMATRIX, accession number PF01032B, p-value=1.360e-16, raw score of 9.12
  DOMAIN (2)..(156): FecCD transport family domain identified by PFam, accession name FecCD_family, E-value=3.3e-07, PFam score of -74.8
MRMLQEENIWIVGTAGEADHTLYQSKMTGRLALVIMHHIMGKLFFTVFAFERDIIDTLKVVLIPVLIAGATALLLSRALNSLSLGSDTATALGSRVARTQLIGLLAITVLCGSATAIVGPIAFIGLMMPHMARWLVGADHRWSLPVTLLATPVVTT

SEQ ID NO: 60410 - protein, 125 aa, Homo sapiens
WVCSTATNWIANMIVGATFLTMLNTLGNANTFWVYAALNVLFILLTLWLVPETKHVFDGLMAAEVMITDMIEIDCFGDPRHLVDIAQKTVQIQVIADAVLITLEVGHIHRIKTHQRSPQANIGFG

SEQ ID NO: 60411 - protein, 476 aa, Homo sapiens
  DOMAIN (26)..(55): Amino acid permeases proteins domain identified by eMATRIX, accession number BL00218A, p-value=8.000e-29, raw score of 15.58
  DOMAIN (291)..(473): Uncharacterised protein family UPF0056 domain identified by PFam, accession name UPF0056, E-value=1.4e-69, PFam score of 244.6
MVDHVKVVADDQAPAEQSLRRNLTNRHIQLIAIGGAIGTGLFMGSGKTISLAGPSIIFVYMIIGFMLFFVMRAMGELLLSNLEYKSFSDFASDLLGPWAGYFTGWTYWFCWVVTGMADVVAITAYAQFWFPDLSDWVASLAVIVLLLTLNLATVKNVGEMEFWFAMIKIVRPLSGSRTKKMSKSDDNRNNVIGLLEDPKSVVKKIKRAVTDSDEPPVVRYDVQRPKRSALLERAPERFQEVFILKGREDKRLLPLIHALESQGGGYPVGKPPISRREKRPCRASGAYSPPVLLILIMDPLGNLPIFMSVLKHTEPKRRRAIMVRELLIALLVMLVFLFAGEKILAFLSLRAETVSISGGIILFLIAIKMIFPSASGNSSGLPAGEEPFIVPLAIPLVAGPTILATLMLLSHQYPNQMGHLVIALLLAWGGTFVILLQSSLFLRLLGEKRVNALERLMGLILVMMAPRCSSTAFECG

SEQ ID NO: 60412 - protein, 198 aa, Homo sapiens
  DOMAIN (86)..(108): SUGAR TRANSPORTER SIGNATURE domain identified by eMATRIX, accession number PR00171D, p-value=8.953e-15, raw score of 12.76
  DOMAIN (1)..(185): Sugar (and other) transporter domain identified by PFam, accession name sugar_tr, E-value=0.011, PFam score of -118.0
SFLLVSPSQACHHYYAPKIFDLSGYTSTTEQMWGTVIVGLTNVLATFIAIGLVDRLGFLAMPAGMGVLGTMMHIGIHSPSAQYFAIAMLLMFIVGFAMSAGPLIWVLCSEIQPLKGRDFGITCSTATNWIANMIVGATFLTMLNTLGNANTFWVYAALNVLFILLTLWLVPETKHVSLEHIERNLMKGRKLREIGAHD

SEQ ID NO: 60413 - protein, 329 aa, Homo sapiens
MSFSVAALLTALPVVTMGGLALAGSWLHQHVSERRSVAISLLLIAVGALMRDFTRKVRCCLTMLGGVGIGIIQAVMPSVIKRRFQQRTPLVMGLWSAALMGGGLQVQRSTLAASGMNKAQEQASHHASLTHSCGKRTGAKRRVMIISPTTHRHEMPSPSATHKGQHVASDSEQNVTAAAVKADSALHPAAAGWMDVIVMDPPKFVENKSQLMGACRGYKDINMLAIQLLNEGGILLTFSCSGLMTSDLFQKIIADAAIDAGRDVQFIEQFRQAADHPVKISREVTMIASKFGIGQQVRHSLLGYLGVVVDIDPVYSLSEPSPDELSGRV

SEQ ID NO: 60414 - protein, 235 aa, Homo sapiens
  misc_feature (1)...(235): Xaa = X or * as defined in Table 2
CMSRQCCTAYVPPVRSCCPPVSVHFFFHSRLCRDALNEAFHPSGFQVVKCCDIARIHRNRYGDLLFAIGVVHIANVNAIHRNATFHQRQEIGGCFTNQQDFLSIGGAMNVVDNFLQRPETYGDPFCQYHFHQVLLYRIFGNLIVGYQHQICPRKSDPLNADLTVNQAFINPAXNNIWHSVFLFVLLIGLHRLCGMRQDVLNMVDNEFPWRWLQLAGANFHVLQRQILADQRQRNW

SEQ ID NO: 60415 - protein, 431 aa, Homo sapiens
  DOMAIN (314)..(364): Sugar transport proteins domain identified by eMATRIX, accession number BL00216B, p-value=6.478e-28, raw score of 27.64
  DOMAIN (1)..(277): Sugar (and other) transporter domain identified by PFam, accession name sugar_tr, E-value=3e-08, PFam score of 40.5
VANCRMNIPEQPSMDELAQTIRKQLQGPARFLERVLLRLRDTSAEAKRELDEIRESLQVKQSGWALFKENSNFRRAMFLGVLLQVMQQFTGMNVIMYYAPKIFELAGYTNTTEQMWGTVIVGLTNVLATFIAIGLVDRWGRKPTLTLGFLAMAAGMGVLGTMMHIGIHSPSAQYFAIAMLLMFIVGFAMSAGPLIWVLCSEIQPLKGRDFGITCSTATNWIANMIVGATFLTMLNTLGNANTFWVYAALNVLFILLTLWLEWVVSSMMLGAAIGALFNGWLSFRLGRKYSLMAGAILFVLGSIGSAFATSVEMLIAARVVLGIAVGIASYTAPLYLSEMASENVRGKMISMYQLMVTLGIVLAFLSDTAFSYSGNWRAMLGVLALPAVLLIILVVFLPNSPRWLAEKGRHIEAEEVLRMLRDTSEKAREEL

SEQ ID NO: 60416 - protein, 218 aa, Homo sapiens
  DOMAIN (122)..(144): SpoU rRNA Methylase family domain identified by eMATRIX, accession number PF00588B, p-value=3.077e-18, raw score of 17.18
  DOMAIN (1)..(142): SpoU rRNA Methylase family domain identified by PFam, accession name SpoU_methylase, E-value=2.5e-60, PFam score of 213.8
MLNIVLYEPEIPPNTGNIIRLCANTGFRLHIIEPMGFAWDDKRLRRAGLDYHEFTAVTRHHDYRAFLEAENPQRLFALTTKGTPAHSAVSYQDGDYLMFGPETRGLPASILDALPAEPKIRIPMVPDSRSMNLSNAVSVVVYEAWRQLGYPGAHHGTCANLRAAPNFNIAEDFRARANHHTFTNFRVTVTTRFTRTAKRHRLQNRYVVFNHRRFTNDD

SEQ ID NO: 60417 - protein, 74 aa, Homo sapiens
VAVERMGIVRFLELAAKRRGAETGRYPDPYRTHSFLLGGWLDGARQFDRKPAGFGYSWPPATQRPHAYPAYAVS

SEQ ID NO: 60418 - protein, 48 aa, Homo sapiens
  misc_feature (1)...(48): Xaa = X or * as defined in Table 2
ATVDPPFITEPGDILAGGFAXPLSWFAGFALEHHNLPWATGDLHSLRA

SEQ ID NO: 60419 - protein, 47 aa, Homo sapiens
ACAHWGHLDCPPLLPQPRGPQSQLEAHASLLGARPPGHTPISAKDGV

SEQ ID NO: 60420 - protein, 662 aa, Homo sapiens
  DOMAIN (209)..(231): SpoU rRNA Methylase family domain identified by eMATRIX, accession number PF00588B, p-value=3.077e-18, raw score of 17.18
  DOMAIN (88)..(229): SpoU rRNA Methylase family domain identified by PFam, accession name SpoU_methylase, E-value=1.3e-60, PFam score of 214.8
AFTHVITRRGGLGQLTRGAVIGFFFPSTTRLLEVDMLKRTASSDLYQLFRNCSLAVLNSGSLTDNSKELLSRFENFDINVLRRGGGSMLNIVLYDPEIPPNTGNIIRLCANTGFRLHIIEPMGFAWDDKRLRRAGLDYHEFTAVTRHHDYRAFLEAENPQRLFALTTKGTPAHSAVSYQDGDYLMFGPETRGLPASILDALPAEQKIRIPMVPDSRSMNLSNAVSVVVYEAWRQLGYPGADTGAYHIIPWSSITTFANFVRGIVSVVANYDVDRHEDADKANQALKDAVAELMENEEIRGLIIGEPNFAGIVGLSNTAFTLRVSFTTLPLKQWTSDLQAHCLGRKSKRISHSKTTRAVTSVWWFVILKAGWSGGHGTLSRMPVKVLTAISAPQASVQTRPPADREAFTRIHLPEHTLYPHTPAIAAGVFIDGDIPMTTQTQHDLAPANQPEFELTVTPVPDEQRIDFWPQYFGAIPQWLLLEPHIFAWMDRFCEGYSGGIWSFYTLSNGGAFMSPEPDIDETAVACLRVGSGGVGGSRQQVRDASLLCCGGLHAANGALGGVSDPVGNTPSRPRSGEEKVSAWPVCASAGASVGGGPGWFGVKAGAGTVPVGWVGGAGSFSVLPKWLIASDGFVFGQAVEGSAANGMAVPVEEDQSDLNTAA

SEQ ID NO: 60421 - protein, 668 aa, Homo sapiens
  DOMAIN (142)..(160): 5-HYDROXYTRYPTAMINE 1B RECEPTOR SIGNATURE domain identified by eMATRIX, accession number PR00513D, p-value=7.319e-09, raw score of 11.06
  DOMAIN (343)..(604): HlyD family secretion protein domain identified by PFam, accession name HlyD, E-value=0.0024, PFam score of 14.9
MKQITFAPRNHLLTNTNTWTPDSQWLVFDMRTSGASFTGETIERVNIPTGYVEKPNKQCRHSVTRYGHGGHSDHTPSLTVATVATQITPRHSGHGSHCDRNLSLATATAATLITPHHLLWPRWPLGSHSVTWCGHGGHSDHTPSPTTATAVTRITSRHPLRPQQSLGSHPVTHYSHGSHSDCIPVTRYAHGGHSDHTPSLAMATAATQMALCHSLWPRQPLGYLVNKIRRKRCTDGVSPSGKAPVFDTGIPWFESRYPSHLLRVSGSPPGYWGIAKRHQILNVSNMFGKFKTNLLGYRQAVRHRILIPAFRGSNPRTPANLFKTLTLISNMRALENDFFNSPPRKTVQFGGTVTEVLLKYKTAIEKRLEKLAVDPHRDRAQMLKVENVQQAWQQWINKLPPARREDEDVKEIRWMIEELRVSYFAQQLGKNSRAESMLWSFHKAAIEAARTNIIQAQTRVEAAQATERRIAADIDDSELKAPRDGRVQYRVAKPGEVLAAGGRVLNMVDLSDVYMTFFLPTEQAGTLKLGGEARLILDAAPDLRIPATISFVASVAQFTPKTVETSDERLKLMFRVKARIPPELLQQHLEYVKTGLPGVAWSFLYSINQTICLRLDSIEAKLQALEATCKSLEEKLDLVTNKQHSPIQVPMVAGSPLRTTQMCNKVRW

SEQ ID NO: 60422 - protein, 270 aa, Homo sapiens; identical to SEQ ID NO: 40701
  DOMAIN (93)..(124): Orn/Lys/Arg decarboxylases family 1 pyridoxal-P attachment si domain identified by eMATRIX, accession number BL00703I, p-value= 3.000e-30, raw score of 14.40
  DOMAIN (1)..(165): Orn/Lys/Arg decarboxylase domain identified by PFam, accession name OKR_DC_1, E-value=3e-86, PFam score of 299.9

SEQ ID NO: 60423 - protein, 2506 aa, Homo sapiens; identical to SEQ ID NO: 37550
  DOMAIN (143)..(192): Thiamine pyrophosphate enzymes proteins domain identified by eMATRIX, accession number BL00187E, p-value=7.577e-33, raw score of 31.32
  DOMAIN (66)..(200): Thiamine pyrophosphate enzymes domain identified by PFam, accession name TPP_enzymes, E-value=2.6e-68, PFam score of 221.7

SEQ ID NO: 60424 - protein, 323 aa, Homo sapiens
  DOMAIN (267)..(278): ORNITHINE CARBAMOYLTRANSFERASE SIGNATURE domain identified by eMATRIX, accession number PR00102D, p-value=4.600e-14, raw score of 14.81
  DOMAIN (249)..(322): Aspartate/ornithine carbamoyltransferase domain identified by PFam, accession name OTCace, E-value=4e-28, PFam score of 104.1
  misc_feature (1)...(323): Xaa = X or * as defined in Table 2
STIIRRFDTQRCNICFTRNNSCGIVNVRLYWYFGFKWFVSLRVCPFGLPYTDMSKGAPSFTWVVESIGYLGFTFMIPIMGAYIASSIADKPAFAPAFLSGAGFLGAVVLGLAIGYFVFWFRKVRLGKALQPLLGSMLIPFVTLLVFGVLTYYVIGPVMSDLMGGLLHFLNTIPPSMKFAAAFLVGAMLAFDMGGPINKTAWFFCFSLLEKHIYDWYAIVGVVALMPPVAAGLATFIAPKLFTRQEKEAASSAIVXXADQGVKGADFIYTDVWVSMGEAKEKWAERIALLRGYQVNAQMMALTDNPNVKFLHCLPAFHDDQTTA

SEQ ID NO: 60425 - protein, 53 aa, Homo sapiens
  misc_feature (1)...(53): Xaa = X or * as defined in Table 2
LTPTWWRKPWNRKPVLSVIPXKWKLKGPVALKTAYPAKRLPLPITSFSLPGVA

SEQ ID NO: 60426 - protein, 689 aa, Homo sapiens
  DOMAIN (492)..(518): COMPONENT PHOSPHOTRANSFERASE SYST domain identified by eMATRIX, accession number PD02963A, p-value=1.391e-23, raw score of 12.85
  DOMAIN (129)..(167): Orn/Lys/Arg decarboxylase domain identified by PFam, accession name OKR_DC_1, E-value=1.7e-11, PFam score of 43.6
MVGLDAGVAKLATLSDGTVFEPVNSFQKNQKKLARLQRQLSRKVKFSNNWQKQKRKIQRLHSCIANIRRDYLHKVTTAVSKNHAMIVIEDLKVSNMSKSAAGTVSQPGRNVRAKSGLNRSILDQAWCLFPRVSMNPQEANYAYLRGEVELVRLPDAEGRIAAEENLPGQTPAAPPGAALQRFRRPCRYGDIAIGIWLIAIQTFRFLSNWTDGKDYCLKVKSCEDRAMKQITFAPRNHLLTNTNTWTPDSQWLVFDVRPSGASFTGETIERVNIHTGEVEVIYRASQGAHVGVVTVHPKSEKYVFIHGPENPDETWHYDFHHRRGVIVEGGKMSNLDAMDITAPYTPGVLRGGSHVHVFSPNGERVSFTYNDHVMHELDPALDLRNVGVAAPFGPVNVQKQHPREYSGSHWCVLGTGGYRPSVSGESPPSRRPRTETTAEETKNSSQDTLLRVCHRFAHDRIFNLLTDACLKICITDSGVKLGKQEVQSGSVMSHLMAGVSAALPFVIGGGILVALANMLVQFGLPYTDMSKGAPSFTWVVEIPSGLPLGFTFMIPIMGAYIASSIADKPAFAPAFLVCYLANDKALLGTQSGAGFLGAVVLGLAIGYFVFWFRKVRLGKALQPLLGSMLIPFVTLLVFGVLTYYVIGPVMSDLMGGLLHFLNTIPPSMKFAAAFLVGAMLAFEMGGPLK

SEQ ID NO: 60427 - protein, 928 aa, Homo sapiens; identical to SEQ ID NO: 60285
  DOMAIN (533)..(563): Putative esterase domain identified by eMATRIX, accession number PF00756D, p-value=8.364e-26, raw score of 16.93
  DOMAIN (14)..(166): Fimbrial proteins domain identified by PFam, accession name Fimbrial, E-value=2.7e-20, PFam score of 80.9

SEQ ID NO: 60428 - protein, 282 aa, Homo sapiens
IMPVKDLTGITAKDAQMLSVVKPLQEFGKLDKCLSRYGTRFEFNNEKQVIFSSDVNNEDTFVILEGVISLRREENVLIGITQAPYIMGLADGLMKNDIPYKLISEGNWSGYHLPAKQTITLIEQNQLWRDAFYWLAWQNRILELRDVQLIVHNSYEQIRATLLSMIDWNEELRSRIRAMDYIHQRTRIWRSVVAEVLAALRKGGYIAMNKGKLLGHQVIDAIAHIFKARQRRTSDHHKRANILLRDHRHIGMKKSRVEAFLIVKDVTHDKKWLDRAIRSGFQ

SEQ ID NO: 60429 - protein, 639 aa, Homo sapiens
  DOMAIN (466)..(512): PTR2 family proton/oligopeptide symporters proteins domain identified by eMATRIX, accession number BL01022B, p-value=1.581e- 30, raw score of 22.19
  DOMAIN (393)..(458): Orn/Lys/Arg decarboxylase domain identified by PFam, accession name OKR_DC_1, E-value=6.8e-36, PFam score of 130.8
MNDCPRHYTQKKAAYRSVLPDVREWGHNPLPWMDEDELRYREEVPCYCGKQGCIETFISGTGFAMDYRRLSGHALKGSEIIRLVEESDPVAELALRRYELRLAKSLAHVVNILDPDVIVLGGGMSNVDRLYQTVGQLIKQFVFGGECETPQPLVSGFHEAELSLDDAKCVIGAERSEMQIIRNFIGQADNADHPQKKKYGRVELVGPFSVRDGEDNYQLYLIRPASSSQSDFINLLFDRPLLLLIVTMLVSTPLLLWLAWSLAKPARKLKNAADEVAQGNLRQHPELEAGPQEFLAAGASFNQMVTALERMMTSQQRLLSDISHELRTPLTRLQLGTALLRRRSGESKELERIETEAQRLDSMINDLLVMSRASAGRVRAARYDRRSLPRRNGRINANMILPYPPGVPLVMPGEMITEESRPVLEFLQMLCEIGAHYPGFETDIHGAYRQADGRYTVKLGFDDNHAISLFSAYASLVYVTPILGGWLADRLLGNRTAVIAGALLMTLGHVVLATEAVSGHHSHILKMAVTALFTYRTVVRVVGHQPLDHAFTELFRFFVVNGNKGAIGSRCHTGHHQATTRVFRVLVLLHRTLAASTDTSQRRMPAKQVRLNPINQMGIAERLFDSRLKFFAEIFDGAL

SEQ ID NO: 60430 - protein, 76 aa, Homo sapiens
  misc_feature (1)...(76): Xaa = X or * as defined in Table 2
KRVSISSRRRFSAQKASASALARWWRSAVNIYVFAIXTTAQRVXQLRMTNCVRTTITACHSRXRITLSLSPVKPAS

SEQ ID NO: 60431 - protein, 1449 aa, Homo sapiens
  DOMAIN (975)..(998): AROMATIC-RING HYDROXYLASE (FLAVOPROTEIN MONOOXYGENASE) SIGNATURE domain identified by eMATRIX, accession number PR00420A, p-value=9.100e-18, raw score of 14.78
  DOMAIN (976)..(1249): Pyridine nucleotide-disulphide oxidoredu domain identified by PFam, accession name pyr_redox, E-value=1e-39, PFam score of 137.1
MPSSALSAIRIKSTMGNSKKRMGCAANINSNPPWLGFEVVGVYHDPKPGGVSNDWAGNLQQLVEDAKAGKIHNVYIAMQMCDGARVKKLVHQLADTTCSVLLIPDVFTFNILHSRLEEMNGVPVVPLYDTPLSGVNRLLKRAEDIVLATLILLLISPVLCCIALAVKLSSPGPVIFRQTRYGMDGKPIKVWKFRSMKVMENDKVVTQATQNDPRVTKVGNFLRRTSLDELPQFINVLTGGMSIVCIPLPRPRREYAPARALKVAKQQRSHRTIDQITEDRGHRQRPEMGANHRTSEARQHRAGFDHADFVELQLFLHQRAELLPVRVIQHVADEITQQKHRHAHHDPQPDVQPVQRGEFKVTDFFSLNNRVSDTEVRKRICQRDNHQRHGITSLTLSSQHYLVITALGADRPGIVNTITRHVSSCGCNIEDSRLAMLGEEFTFIMLLSGSWNAITLIESTLPLKGAELDLLIVMKRTTARPRPPMPASVWVQVDVADSPHLIERFTALFDAHHMNIAELVSRTQAAENERAAQLHIQITAQSPGSADAANIEQAFKGLCTELSAQGLRISNRTFKHWNAQTLSDTQRIGFAAALPRRHGGAYTTSYYLRDKCRAYINGAIILDRSTIPCAGTDPLFRAWELGLVETQQALVANGLRHKIRLQVDGGLKTGVDIIKAAILGAESFGFGTGPMVALGCKYLRICHLNNCATGVATQDDKLRKNHYHGLPFKVTNYFEFIARETRELMAQLGVTRLVDLIGRTDLLKELDGFTAKQQKLALSKLLETAEPHPGKALYCTENNPPFDNGLLNAQLLQQAKPFVDERQSKTFWFDIRNTDRSVGASLSGYIAQTHGDQGLAADPIKAYFNGTAGQSFGVWNAGGVELYLTGDANDYVGKGMAGGLIAIRPPVGSAFRSHEASIIGNTCLYGRTGCQYNCTRLDYDSALNIRELKKVALEKGWDEYKQRWHKPAGSGSRHPVAVIGAGPAGLAAGYFLARAGHPVTLFEREANAGGVVKNIVPQFRIPAELIQHDIDFVAAHGVKFEYGCSPDLTIEQLKNQGFHYVLIATGTDKNSGVKLAGDNQNVWKSLPFLREYNKGTALKLGKHVVVVGAGNTAMDCARAALRVPGVEKATIVYRRSLQEMPAWREEYEEALHDGVEFRFLNNPERFDADGTLTLRVMSLGEPDEKGRRRPVETNETVTLLVDSLITAIGEQQDTEALNAMGVPLDKNGWPDVDHNGETRLTDVFMIGDVQRGPSSIVAAVGTARRATDAILSRENIRSHQNDKYWTTSIQRKVRAYDSGDGKVQTLGAVEHSPLYTSVDPLQSMSREEKLDILRRVDKVAREADKRVQEVTASLSGVYELILVAATDGTLAADVRPLVRLSVSVLVEEDGKRERGASGGGGRFGYEFFLADLDGEVRADAWAKEAVRMALVNLSAVAAPAGTMPVVLGA

SEQ ID NO: 60432 - protein, 368 aa, Homo sapiens
  DOMAIN (226)..(251): Prokaryotic transglycosylases proteins domain identified by eMATRIX, accession number BL00922A, p-value=7.677e-22, raw score of 18.42
  DOMAIN (203)..(331): Transglycosylase SLT domain identified by PFam, accession name SLT, E-value=5.7e-46, PFam score of 166.1
KQTQHAPGMMKKYLALALIAPLLISCSTTKKGDTYNEAWVKDTNGFDILMGQFAHNIENIWGFKEVVIAGPKDYVKYTDQYQTRSHINFDDGTITIETIAGTEPAAHLRRAIIKTLLMGDDPSSVDLYSDVDDITISKEPFLYGQVVDNTGQPIRWEGRASNFADYLLKNRLKSRSNGLRIIYSVTINMVPNHLDKRAHKYLGMVRQASRKYGVDESLILAIMQTESSFNPYAVSRSDALGLMQVVQHTAGKDVFRSQGKSGTPSRSFLFDPASNIDTGTAYLAMLNNVYLGGIDNPTSRRYAVITAYNGGAGSVLRVFSNDKIQAANIINTMTPGDVYQTLTTRHPSAESRRYLYKVNTAQKSYRRR

SEQ ID NO: 60433 - protein, 48 aa, Homo sapiens
PKSACFAVRTSVSSDRSRLLECKLCRESCMPAGPKTCATTVLRILSYA

SEQ ID NO: 60434 - protein, 171 aa, Homo sapiens
  misc_feature (1)...(171): Xaa = X or * as defined in Table 2
PRVIENFLFQLTFLPGGITQSHQYVRRLFIGAERFQHIAGSGHYRVVXNANAGSKIGGRSMQNKPAIFSQRTAEHNRFIQTDXFITRLRRDLQLFQNPFNFEIFQRLVDDDPHCTIGIMFANVDHGTTENRIRKLCFNLTNTGTQRKGHANISGPETFRIYHRNAHAPLTI

SEQ ID NO: 60435 - protein, 175 aa, Homo sapiens
  DOMAIN (130)..(139): w MOTB CHEMOTAXIS 246 LAFU. domain identified by eMATRIX, accession number DM01941E, p-value=1.551e-09, raw score of 5.79
  DOMAIN (40)..(131): OmpA family domain identified by PFam, accession name OmpA, E -value=0.00013, PFam score of 16.4
MNACRSPLLKKKSATELGELATSINTIARDAHMEANLEMEIVPQGLRVLIKDDQNRMFDSLDNKIIITGHNDAMAYKNNIYNNWNLSGDRALSVRRVLEEAGMPEDKVMQVSAMADQMLLDSKNPQSAGNRRIEIMVLTKSASDTLYQYFGQHGDKVVQPLVQKLDKQQVLSQRT

SEQ ID NO: 60436 - protein, 81 aa, Homo sapiens
PWQLDVIHVMCIKHALIGQVVHSKHRLRRTPARRQIRRRKACMPVVRMHHIRTPEWVKPAGHFCPNPPQQRKTQYVVGIGK

SEQ ID NO: 60437 - protein, 1048 aa, Homo sapiens; identical to SEQ ID NO: 52852
  DOMAIN (6)..(60): ATP-BINDING TRANSPORT TRANSMEMBR domain identified by eMATRIX, accession number PD00131B, p-value=5.650e-13, raw score of 34.97
  DOMAIN (1)..(180): ABC transporter domain identified by PFam, accession name ABC_tran, E-value=1.2e-60, PFam score of 214.9

SEQ ID NO: 60438 - protein, 93 aa, Homo sapiens
  misc_feature (1)...(93): Xaa = X or * as defined in Table 2
LLPQRQAKAPVLPLPLPTENVPAARAGKKDAVIFSSAQFEQIALAANGAFTGGXYQNRQXNMRCYASGESVTDRPRLAIRDATIGISGFCSLA

SEQ ID NO: 60439 - protein, 78 aa, Homo sapiens
RSDRLLIHGFSFPAMGFRLRKTVVAHVFGERTMATLGRLMSLLSPFDVVIWMTDGWPLYESRLKGKLHVISKRYSAAN

SEQ ID NO: 60440 - protein, 209 aa, Homo sapiens
  DOMAIN (65)..(100): Carbamoyl-phosphate synthase subdomain proteins domain identified by eMATRIX, accession number BL00866C, p-value=4.000e- 15, raw score of 23.26
  DOMAIN (16)..(88): Carbamoyl-phosphate synthase (CPSase) domain identified by PFam, accession name CPSase_L_chain, E-value=4.2e-35, PFam score of 125.8
LAQSISITRAEAKKCRHQKVVEESPPTGITPELRRYIGERCAKACVDIGYRGAGTFEFLFENGEFYFIEMNTRIQVEHPVTEMITGVDPVLQLAGTGHCCRVHQSTGDGRSGQPNCVTVLAGADHAIIPVMLGDAVVAQNFARELQKEGIYVTGFFYPVVPKGQARIRTQMSAAHTPEQITRAVEAFTRIGKQLGVIAFTSITGMSGRK

SEQ ID NO: 60441 - protein, 210 aa, Homo sapiens
HRLSMCRGRCSRWWSARTNVISMLVFALSFASWRIVSPRTMDALTFAAESALPGSPTHISTDHQGQFVFVGSYNAGNVSVTRLEDGLTMLHEELSSHMMKEEQILFPMIKQGMGSQAMGPISVMESEHDEAGELLEVIKHTTNNVTPPPEACTTNKQPAQPQRDKPQRGNQQRLASVIFQCQQHDHEHKERHTYPAHQLAERHLVDRLLM

SEQ ID NO: 60442 - protein, 124 aa, Homo sapiens
SASQLTVAGSGRLQPEPIQRRIFVFSTRLPRARNLIMRASLSASGYRNCAMCQGKWCMSRGSGRRKQQHPPRPAFTPPLPPSRTGSQATHPTSSQSGRWTYQSSVTKQHHTQQTNPQTRHRMTK

SEQ ID NO: 60443 - protein, 884 aa, Homo sapiens; identical to SEQ ID NO: 52848
  DOMAIN (598)..(649): D-isomer specific 2-hydroxyacid dehydrogenases NAD-binding si domain identified by eMATRIX, accession number BL00065C, p-value= 1.621e-35, raw score of 27.25
  DOMAIN (482)..(670): D-isomer specific 2-hydroxyacid dehydr domain identified by PFam, accession name 2-Hacid_DH, E-value=6.3e-140, PFam score of 342.4

SEQ ID NO: 60444 - protein, 55 aa, Homo sapiens
ERQRLPSQPCQVLPQIQVMPLNSLRISLADYVQLSLQAGFIQRPAIRHPYHHVKG

SEQ ID NO: 60445 - protein, 140 aa, Homo sapiens
  misc_feature (1)...(140): Xaa = X or * as defined in Table 2
TFLHSIPAAKTQGPPPRNTLVDTPQHLXHQQRRTRQPQLALSLRTXVFLNRILRGALFAPKACLKPDLVISPRGPPQGLGVTRVQVSAHTNPRTTHRNTPHYTRNTQTRPESTPRRDTTTPQQRHTPPPHTGKRRGTPET

SEQ ID NO: 60446 - protein, 75 aa, Homo sapiens
  misc_feature (1)...(75): Xaa = X or * as defined in Table 2
SSTVFSNLDRSDSPISQSKMKIIASITTIRMEPXAIATPYSPSSTRLRMXAVATRVSGVTRNTMALTVVMARTKL

SEQ ID NO: 60447 - protein, 88 aa, Homo sapiens
  misc_feature (1)...(88): Xaa = X or * as defined in Table 2
LPGLAKLTVKDLPRLSLAFEREVRDSPISQSKMKIIASITTIRMEPXAIATPYSPSSTRLRMXAVATRVSGVTRNTMALTVVMARTKL

SEQ ID NO: 60448 - protein, 63 aa, Homo sapiens
  misc_feature (1)...(63): Xaa = X or * as defined in Table 2
LPQCKWDPYGVTISPQVSIRSRANPSCTSPFFVXSATKGLLYQQTRIPALDIPPSSNRRNSHG

SEQ ID NO: 60449 - protein, 132 aa, Homo sapiens
  misc_feature (1)...(132): Xaa = X or * as defined in Table 2
YGHEWRWMPGNRPHYGRWPQHDFPPFKKLRPQSVTSRIQPGSDVIVCAEMDEQWGYVGAKSRQRWLFYAYDSLRKTVVAHVFGERSLFTGPXRERFATQIEVGKLFAAAVDMVLWLSGKAQPDTVVVKVVVL

SEQ ID NO: 60450 - protein, 320 aa, Homo sapiens
RFLLQQLLDLFDQCRVIHRWRLTDDLTCRLQRHLHQARRYHTIKCIKGSLKFADQLLHPGMNWRLLRLRLCQTLLQPLGQSFLIALLMTLLATFGNTRLITLLMGLHLQLRQLLLKAGFSLFNDGFFRLDYGHKLCHLASFGKAAHNQQNRFLFVFHLRQTHRTTVGEIVAQNIGGTLRHIAQEFLAQWLLGSFQRDQQRFGIHFLQQTLNAAIVDIHQILEQEHLVDDFLRQLAVEFTHGGNNGFFLLSFHQVDNFGCRSHGGSFRVRPLRNTLVHPGCLPHFWLSSLFPHHLLEHSSTTNRLHFFTFLSPCNPAFAVF

SEQ ID NO: 60451 - protein, 923 aa, Homo sapiens
  DOMAIN (309)..(341): Phosphofructokinase proteins domain identified by eMATRIX, accession number BL00433D, p-value=2.440e-29, raw score of 13.22
  DOMAIN (216)..(345): Phosphofructokinase domain identified by PFam, accession name PFK, E-value=1e-97, PFam score of 267.8
MWSFELRFPRAVTDAAIVGRHVGTTLMVARYAVNTLKEVETSLSRFEQNGIPVKGVILNSIFRRASAYQDYGYYEYEYSRMRNNDACIRTAPPDKAFTPHPASKPAHKPGEQPMKNNPLISIYMPTWNRQQLAIRAIKSVLRQDYSNWEMIIVDDCSTSWEQLQHAFTEYVRNNRLPEPVIRVKQPALARFSPDVSPLFVHFRADDDVTARLYAREAIDRLRDTSSSHQRISVVEVMGRYCGDLTLAAAIAGGCEFVVVPEVEFSREDLVNEIKAGIAKGKKHAIVAITEHMCDVDELAHFIEKETGRETRATVLGHIQRGGSPVPYDRILASRMGAYAIDLLLAGYGGRCVGIQNEQLVHHDIIDAIENMKRPFKEVIKESKVEEPRKRETVSIMLTKYAAYNTFHHCEQCRQYMDFTSASQNELALHSKKEIDEYFAHVWQTMQACIDRGMNTEGVLPGPLRVPRRASALRRMLVSSDKLSNDPMNVIDWVNMFALAVNEENAAGGRVVTAPTNGACGIVPAVLAYYDHFIESNCWAVARNRDVMRDGRIEQDGTPREIYEEPKNLFVAGFIGEINMFNATVIERLDEQRVRANVEGRECNIYVNFAVEPGQKLHVLLRPEDLRVEEINDDNHAEGLIGYVRERNYKGMTLESVVELENGKMVMVSEFFNEDDPDFDHSLDQKMAINWVESWEVVLADEEHKICWTFIRAPMNFHVWFRSQKPGFPMVQQSRIVPAFVTQQMVFPDWKVSFLFTFTHPGHFKLVRRPDQIHILRFGTHFDDLTIGLFTLIFQRLDLRCVLGQPRLRQSIGLAIEVILHLHHQPHASNGNTSLHDCFQIFLCILFSIRNLIGQIFDIAVPPDSATDGVVRNGKSTAGHQRYLCSHCRKTWQLQFTLHRFSTGTLGFSVVHWAGPWVPSKTRR

SEQ ID NO: 60452 - protein, 427 aa, Homo sapiens
  DOMAIN (399)..(411): PROTEIN GLUTATHIONE SYNTHETASE SY domain identified by eMATRIX, accession number PD02939A, p-value=1.871e-09, raw score of 13.85
MIPEFESPVKNSLSKDQNQETSLQGLQVLPFMASADAANHIGRVLRMGPGQALQLFDGSNQVFDAEITSASKKSVEVKVLEGQIDDRESPLHIHLGQVMSRGEKMEFTIQKSIELGVSLITPLFSERCGVKLDSERLNKKLQQWQKIAIAACEQCGRNRVPEIRPAMDLEAWCAEQDEGLKLNLHPRASNSINTLPLPVERVRLLIGPEGGLSADEIAMTARYQFTDILLGPRVLRTETTALTAITALQLGIVMDPIANINIKKDSSFAMLLEAQRRGYELHYMEMGDLYLINGEARAHTRTLNVKQNYEEWFSFVGEQDLPLADLDVILMRKDPPFDTEFIYATYILERAEEKGTLIVNKPQSLRDCNEKLFTAWFSDLTPETLVTRNKAQLKAFWEKHSDIILKPLDGMGGASIFRVKEGGISSS

SEQ ID NO: 60453 - protein, 74 aa, Homo sapiens
  misc_feature (1)...(74): Xaa = X or * as defined in Table 2
LRIQASDPEINSRRESGIHLPYTTDKAPSPLTVDGAKXEVSRSSIRQNSQVQHPPDAAKYPSGCHKSFRGFRRA

SEQ ID NO: 60454 - protein, 87 aa, Homo sapiens
  DOMAIN (54)..(69): C5A-ANAPHYLATOXIN RECEPTOR SIGNATURE domain identified by eMATRIX, accession number PR00426F, p-value=8.747e-09, raw score of 5.79
  misc_feature (1)...(87): Xaa = X or * as defined in Table 2
SANSTLKRTQVNRRPLTVKLSARKLPMLKVNTRNSLVVVVSMVMLLSTCTRWSRVQTRKATSSSTTLKVVXSLANTSRPLIKVSRNS

SEQ ID NO: 60455 - protein, 914 aa, Homo sapiens
  DOMAIN (538)..(562): E1-E2 ATPases phosphorylation site proteins domain identified by eMATRIX, accession number BL00154F, p-value=3.489e-17, raw score of 8.23
  DOMAIN (13)..(71): E1-E2 ATPase domain identified by PFam, accession name E1- E2_ATPase, E-value=3.1e-09, PFam score of 33.8
SRCRRISTRLNLVPCDVLLLRGRCIVDEAMLTGESVPQMKEPIEDLSPDRVLDLQADSRLHVIFGGTKVVQHIPPQKATTGLKPVDSGCVAYVLRTGFNTSQGKLLRTILFGVKRVTANNLETFIFILFLLVFAIAAAAYVWIEGTKDPSRNRYKLFLECTLILTSVVPPELPIELSLAVNTSLIALAKLYMYCTEPFRIPFAGKVEVCCFDKTGTLTSDSLVVRGVAGLRDGKEVTPVSSIPVETHRALASCHSLMQLDDGTLVGDPLEKAMLTAVDWTLTKDEKVFPRSIKTQGLKIHQRFHFASALKRMSVLASYEKLGSTDLCYIAAVKGAPETLHSMFSQCPPDYHHIHTEISREGARVLALGYKELGHLTHQQAREVKREALECSLKFVGFIVVSCPLKADSKAVIREIQNASHRVVMITGDNPLTACHVAQELHFIEKAHTLILQPPSEKGRQCEWRSIDGSIVLPLARGSPKALALEYALCLTGDGLAHLQATDPQQLLRLIPHVQVFARVAPKQKEFVITSLKELGYVTLMCGDGTNDVGALKHADVGVALLANAPERVVERRRRPRDSPTLSNSGIRATSRTAKQRSGLPPSEEQPTSQRDRLSQVLRDLEDESTPIVKLGDASIAAPFTSKLSSIQCICHVIKQGRCTLVTTLQMFKILALNALILAYSQSVLYLEGVKFSDFQATLQGLLLAGCFLFISRSKERPLPNIFNLYTILTVMLQFFVHFLSLVYLYREAQARSPEKQEQFVDLYKEFEPSLVNSTVYIMAMAMQMATFAINYKGPPFMESLPENKPLVWSLAVSLLAIIGLLLGSSPDFNSQFGLVDIPVEVSGPVEVTLGLSLMGPSYGSDPELGCRSPAHHPSLPRQFKLVIAQVLLLDFCLALLADRVLQFFLGTPKLKVPS

SEQ ID NO: 60456 - protein, 273 aa, Homo sapiens
  DOMAIN (139)..(160): AROMATIC-L-AMINO-ACID DECARBOXYLASE SIGNATURE domain identified by eMATRIX, accession number PR00800G, p-value=8.119e- 12, raw score of 11.29
  DOMAIN (130)..(237): Pyridoxal-dependent decarboxylase conse domain identified by PFam, accession name pyridoxal_deC, E-value=9.2e-44, PFam score of 153.1
MRGEVLLAGVPRHVAEREIATLAGSFSLHEQNIHNLPRDQGPGNTVSLEVESENITERFFVVGEKRVSAEVVAAQLVKEVKRYLASTAAVGEYLADQLVLPMALAGAGEFTVAHPSCHLLTNIAVVERFLPVRFSLIETDGVTRSTVSESTLIALLAARKNKILEMKTSEPDADESCLNARLVAYASDQAHSSVEKAGLISLVKMKFLPVDDNFSLRGEALQKAIEEDKQRGLVPVFKQCAQRTKRSGGAGAQADPADPRGISGARSPGNPAP

SEQ ID NO: 60457 - protein, 65 aa, Homo sapiens
QRHPARQVPFTPPHPFCHPAAQRVVKIATFDQRLFILCPRVVDQPVLTVVMVPVSPLIIRAELLQ

SEQ ID NO: 60458 - protein, 1589 aa, Homo sapiens; identical to SEQ ID NO: 34556
  DOMAIN (58)..(90): Nickel-dependent hydrogenases large subunit proteins domain identified by eMATRIX, accession number BL00507D, p-value=8.297e- 26, raw score of 14.28
  DOMAIN (610)..(794): Bacterial type II secretion system prote domain identified by PFam, accession name GSPII_E, E-value=1.7e-121, PFam score of 410.8

SEQ ID NO: 60459 - protein, 85 aa, Homo sapiens
  misc_feature (1)...(85): Xaa = X or * as defined in Table 2
FSSVVMCSSIIVSEQEITSRLKATVASQVADSAGLNSRKITSCRSSAFLSALIRHPTGGIFNKLXLSGTLNPALLSFITSHGILL

SEQ ID NO: 60460 - protein, 139 aa, Homo sapiens
LFEQRFAPYSGRDNQQIKRSIYLLAERGKLAELRLLVIPGQVDYLQHIEELAAFIKGLGDVPVRLNAFHAHGVYGEAQRAYGSAQTCRPDKTRQASHQALCANCRMRRKRLIRPTVRHKPVGMIRRDKRRIRQRLPDAA

SEQ ID NO: 60461 - protein, 595 aa, Homo sapiens
  DOMAIN (347)..(358): RNA 3'-terminal phosphate cyclase proteins domain identified by eMATRIX, accession number BL01287C, p-value=9.679e-13, raw score of 9.22
  DOMAIN (236)..(527): RNA 3'-terminal phosphate cyclase domain identified by PFam, accession name RCT, E-value=3.2e-52, PFam score of 186.9
MAVVIQAGLLIILLPRQPDKLLQLMRVLFIQQVAPFIIFCAPRCCPFRADERQRQAAMVAVVMTGFTLRPDRAALEIASRVYNGNATPRHFLWWANPAVKGGEGHQSVFPPDVTAVFDHGKRAVSAFPIATGTYYKVDYSAGVDISRYKNVPVPTSYMAEKSQYDFVGAWCHDEDGEFAMRRELAIEFSRVTESAALAGYKWLGRGDKNTADGAAVNAMRIMLNQAGSVLLAPRLMALLNLKTGDTIDVGDATLRIAGEVIQEPDSGFNPFQMAPRLMMNLADVDKTGAVQPGSRVTWRYKFGGNENQLDGYEKWLGGIGQWRRHQTLEGPRVGEIGINQRTTLLRHGFYPAGGGVVATEVSPVASFNTLQLGERGNIVQMRGEVLLAGVPRHVAEREIATLAGSFSLHEQNIHNLPRDQGPGNTVSLEVESENITERFFVVGEKRVSAEVVAAQLVKEVKRYLASTAAVGEYLADQLVLPMALAGAGEFTVAHPSCHLLTNIAVVERFLPVRFSLIETDGVTRQLLGVLYRILAMGHAEFLIQIADMRFDGGCRDFQFSGNLLIAVTRVDQPQYLPFTLRQRAGADQFRYFRMI

SEQ ID NO: 60462 - protein, 56 aa, Homo sapiens
  misc_feature (1)...(56): Xaa = X or * as defined in Table 2
LEHLSPCDSIRHSRTRATAAIRSRCYSKYAQXIRDHRVNGDGVSRLYAANQHRTCQ

SEQ ID NO: 60463 - protein, 317 aa, Homo sapiens
  DOMAIN (274)..(284): Cytidine and deoxycytidylate deaminases zinc-binding region s domain identified by eMATRIX, accession number BL00903, p-value= 7.000e-10, raw score of 12.93
  DOMAIN (216)..(295): Cytidine and deoxycytidylate deaminase domain identified by PFam, accession name dCMP_cyt_deam, E-value=4.6e-29, PFam score of 110.0
MMLGRELDTHALQRAGRTLLSDKPVAAFKNYGKKGTIAPFDLEVRPGEIVGLAGLLGSGRTETAEVIFGIKPADSGTALIKGKPQNLRSPHQASVLGIGFCPEDRKTDGIIAAASPLVEAVYFDTPWLPRVNLIASQIQRGYGGWVLTMRCLGHEKVAQLERKIGTPLRLYSGYSDSNQDNPLLYFCQHRWRVTPRVEFSHEYWMRHALTLAKRAWDEREVPVGAVLVHNHRVIGEGWNRPIGRHDPTAHAEIMALRQGGLVMQNYRLIDATLYVTLEPCVICAGAMIHSRIVAWSLVRVTRKLALRILMILDIRGL

SEQ ID NO: 60464 - protein, 140 aa, Homo sapiens
  misc_feature (1)...(140): Xaa = X or * as defined in Table 2
SIRQTHVQIVRRSCLAIRHQVPSTAIRVGIVKGNFASXAGAQPSKTLRXHRCTTRALTSGVLAVRLSAGCNFPELVHRRLTLWRAGRTYPPASGHHHDNRNAPSLSDQTRTDPPIRAHASRYQRQKPDWLTPPFPAGQRC

SEQ ID NO: 60465 - protein, 463 aa, Homo sapiens
  DOMAIN (377)..(387): Cytidine and deoxycytidylate deaminases zinc-binding region s domain identified by eMATRIX, accession number BL00903, p-value= 3.143e-11, raw score of 12.93
  DOMAIN (319)..(398): Cytidine and deoxycytidylate deaminase domain identified by PFam, accession name dCMP_cyt_deam, E-value=9e-34, PFam score of 125.6
MRIIDNLEQFRQIYASGKKWQRCVEAIENIDNIQPGVAHSIGDSLTYRVETDSATDALFTGHRRYFEVHYYLQGQQKIEYAPKETLQAAEKPLRSTKGKSLFAISMKRIGLSAITRSKKWFSKSPSKMCISITNNNYGGKRSLRHRYPTHFRRCVMSDTKRNTIGKFGLLSLTFAAVYSFNNVINNNIELGLALVQERLTTYLLSSDADIWLITGSPQPLVEAVYFDTPWLPRVNLIASQIQRGYGGWVLTMRCLGHEKVAQLERKIGTPLRLYSGYSDSNQDNPLLYFCQHRWRVTPRVEFSHEYWMRHALTLAKRAWDEREVPVGAVLVHNNRVIGEGWNRPIGRHDPTAHAEIMALRQGGLVMQNYRLIDATLYVTLEPCVMCAGAMIHSRIGRVVFGARDAKTGAAGSLMDVLHHPGMNHRVEIYGGILADECAALLSDFFRMRRQEIKAQKKAQSSTD

SEQ ID NO: 60466 - protein, 126 aa, Homo sapiens
  DOMAIN (46)..(60): Transcriptional regulatory protein C terminal. domain identified by eMATRIX, accession number PF00486B, p-value=7.158e- 14, raw score of 11.05
  DOMAIN (1)..(105): Response regulator receiver domain identified by PFam, accession name response_reg, E-value=3.8e-07, PFam score of 37.2
MKLLIVEDEKKTGEYLTKGLTEAGFVVDLADNGLNGYHLAMTGDYDLIILDIMLPDVNGWDIVRMLRSANKGTSTEDEKLKSNFVLRHWYNLSDGAMEDALYEIASMRLFARLSLDSALPEALDDQ

SEQ ID NO: 60467 - protein, 1085 aa, Homo sapiens; identical to SEQ ID NO: 56330
  DOMAIN (231)..(266): Carbamoyl-phosphate synthase subdomain proteins domain identified by eMATRIX, accession number BL00866C, p-value=5.500e- 25, raw score of 23.26
  DOMAIN (220)..(317): Carbamoyl-phosphate synthase (CPSase) domain identified by PFam, accession name CPSase_L_chain, E-value=1.1e-45, PFam score of 162.9

SEQ ID NO: 60468 - protein, 659 aa, Homo sapiens
  DOMAIN (622)..(645): Porphobilinogen deaminase cofactor-binding site proteins domain identified by eMATRIX, accession number BL00533A, p-value= 6.000e-20, raw score of 16.82
  DOMAIN (424)..(575): Pyridine nucleotide-disulphide oxidore domain identified by PFam, accession name pyr_redox, E-value=1.2e-30, PFam score of 106.4
IMKITLSKRIGLLAILLPCALALNTTVHAETNKLVIDLGNGAQSRQHAAMEKEQWNDTRNLRQKVNKRTEKEWDKADAAFDNRDKCEQSANINAYWEPNTLRCLDRRTGRLRPLEREDLRYVHQLDNNASVMRYWFEEPYEAFVELSDLYDKHIHDQSERRFVVECDGEKAGLVELVEINHVHRRAEFQIIISPEYHRKRLATRLTEAGFVVDLADNGLNGYHLAMTGDYDLIILDIMLPDVNGWDIVRMLRSANKGMPILLLTALGTIEHRVKGLELGADDYLVKPFAFAELLARVRTLLRRGAAVIIESQFQVADLMVDLVSRKVTRSGTRITLTSKEFTLLEFFLRHQGEVLPRSLIASQVLDMNFDSDTNAIDVAVKRLRGKIDNDFEPKLIQTVRGVGYMLEVGGNRKEIEAKMSKVRLAIIGNGMVGHRFIEDLLDKSDAANFDITVFCEEPRIAYDRVHLSSYFSHHTAEELSLVREGFYEKHGIKVLVGERAITINRQEKVIHSSAGRTVFYDKLIMATGSYPWIPPIKGSDTQDCFVYRTIEDLNAIESCARRSKRGAVVGGGLLAQDDNSKRQPEVDIPMPQFPFSPHFPPTPNFFARFPMKEKKGQTDACCRIATRQSPLALWQAHYVKDKLMAKPSGAWVVELGTDG

SEQ ID NO: 60469 - protein, 195 aa, Homo sapiens
  DOMAIN (97)..(148): Electron transfer flavoprotein beta-subunit proteins domain identified by eMATRIX, accession number BL01065E, p-value=2.059e- 35, raw score of 31.58
  DOMAIN (1)..(194): Electron transfer flavoprotein beta subunit domain identified by PFam, accession name ETF_beta, E-value=4.2e-50, PFam score of 179.9
MNCDENMNSSVCCLQVRGPHSLYLVQDAQLEHALPLDTAKALAAAIEKIGFDLLIFGEGSGDLYAQQVGLLVGEILQLPVINAVSAIQRQGNTLVIERTLEDDVEVIELSVPAVLCVTSDINVPRIPSMKAILGAGKKPVNQWQASDIDWSQSAPLAELVGIRVPPQTERKHIIIDNDSPEAIAELAEHLKKALN

SEQ ID NO: 60470 - protein, 105 aa, Homo sapiens
  misc_feature (1)...(105): Xaa = X or * as defined in Table 2
CPMADTPATXPIPKRLMLCYSTGLPACYITVKPPXTLGSVQGSLGPSSGPKTAGAPSSRPPSPSARRPRTTETRWTLLRSKDYWLITRKVGLGNLQDGGRAGSLS

SEQ ID NO: 60471 - protein, 116 aa, Homo sapiens
  misc_feature (1)...(116): Xaa = X or * as defined in Table 2
NMLMNVCNLPVVCVPMMSRKRGCVTITWALICGLSWGCRMSGGLRKPAPRPQKWRCLPIIVGRRKSGGSKIRANVCSLPIFPSGIGRXTTGESKRLCRSYHDAAGNDSXWRDLVIG

SEQ ID NO: 60472 - protein, 68 aa, Homo sapiens
  misc_feature (1)...(68): Xaa = X or * as defined in Table 2
VQHSCRMCGTHSQKCPSHRQKLRPHGHLVAXCLCAGSREWEANPLFPGRGHCTDSPPETRPHQLVQRV

SEQ ID NO: 60473 - protein, 134 aa, Homo sapiens
  DOMAIN (44)..(65): Heavy-metal-associated domain proteins domain identified by eMATRIX, accession number BL01047B, p-value=8.105e-15, raw score of 19.73
  misc_feature (1)...(134): Xaa = X or * as defined in Table 2
STRSGGNCRGAGAGVXSGPVAGRXSQSGDRAESTSPLAMVGDGINDAPAMKAAAIGIAMGSGTDVALETADAALTHNHLRGLVQMIELARATHANIRQNITIALGLKGIFLVTTLLGMTGLWLAVLADTGATVL

SEQ ID NO: 60474 - protein, 55 aa, Homo sapiens
RQASSDYPEQRFAACNVSPLVNRLILHRLLRDQAHHVPVVAVGSHARWILLPTLH

SEQ ID NO: 60475 - protein, 276 aa, Homo sapiens
  DOMAIN (47)..(77): Ribulose-phosphate 3-epimerase family proteins domain identified by eMATRIX, accession number BL01085E, p-value=5.355e- 21, raw score of 18.87
  DOMAIN (1)..(81): Ribulose-phosphate 3 epimerase family domain identified by PFam, accession name Ribul_P_3_epim, E-value=1.4e-05, PFam score of -59.7
  misc_feature (1)...(276): Xaa = X or * as defined in Table 2
NTISIRPIKLRSXLCDPGFAGQPFIPEMLDKLAELKAWREREGLEYEIEVDGSCNQATYEKLMAAGADVFIVGTSGLFNHAENIDEAWRVMTAQILAAKSEQWGQQVYAIVQNTDQAQAVMPYGPKCLYVLAQNDALQRTENYAESIAALLKDKHPAMLLLAATKRVLFAIVDTYVTTNASLAGIALNSMDLSPGGRVAVKESNQRWCSDGFEFCCDNGERLRVTFALDCCDREALHWAVTTGGFNSETVQDVMLGAVETPLRQRSSVVSSGVADG

SEQ ID NO: 60476 - protein, 314 aa, Homo sapiens
  DOMAIN (10)..(263): AIR synthase related protein domain identified by PFam, accession name AIRS, E-value=5.1e-11, PFam score of 50.0
PFPKMLETILHSEQAKFVDPNLLVGNETRDDAAVYDLGNGTSVISTTDFFMPIVDNPFDFGRIAATNAISDIFAMGGKPIMAIAILGWPINKLSPEIAREVTEGGRYACRQAGIALAGGHSIDAPEPIFGLAVTGIVPTERVKKNSTAQAGCKLFLTKPLGIGVLTTVRRLNALKRADFSHHADRIRCPVQIICASDDLLVPTACSSELHAALPDSQKMVMPYGGHAFIAHCQGVVLLGVEAKRLLHSSALRFEACLIAYTGACRSHFLLARTAIVNRFFPLVAHHHQLLLERSHIIISFFPSRHAINWLQRRR

SEQ ID NO: 60477 - protein, 45 aa, Homo sapiens
  misc_feature (1)...(45): Xaa = X or * as defined in Table 2
CGGCPQSRHRPAPALRYPQLQMPHWRRSICTSLHRQRXWTPSGSV

SEQ ID NO: 60478 - protein, 93 aa, Homo sapiens
  misc_feature (1)...(93): Xaa = X or * as defined in Table 2
CASVPRSRGGSQAIAARKSGRALIKSASLSXFKXLLKPAINAGXQASXWRASASKPCSASPDCAGDNCASIVSAASALALGCSKRISAPRTAP

SEQ ID NO: 60479 - protein, 18 aa, Homo sapiens
KYWRGTRSEEGRTSWRQS

SEQ ID NO: 60480 - protein, 457 aa, Homo sapiens
  DOMAIN (326)..(369): Acyl-CoA dehydrogenases proteins domain identified by eMATRIX, accession number BL00072E, p-value=2.184e-28, raw score of 24.12
  DOMAIN (5)..(368): Acyl-CoA dehydrogenase domain identified by PFam, accession name Acyl-CoA_dh, E-value=7.2e-201, PFam score of 680.7
MDFNLNDEQELFVAGIRELMASENWEAYFAECDRDSVYPERFVKALADMGIDSLLIPEEHGGLDAGFVTLAAVWMELGRLGAPTYVLYQLPGGFNTFLREGTQEQIDKIMAFRGTGKQMWNSAITEPGAGSDVGSLKTTYTRRNGKIYLNGSKCFITSSAYTPYIVVMARDGASPDKPVYTEWFVDMSKPGIKVTKLEKLGLRMDSCCEITFDDVELDEKDMFGREGNGFNRVKEEFDHERFLVALTNYGTAICGAYANQRVQFGEAIGRFQLIQEKFAHMAIKLNSMKNMLYEAAWKADNGTITSGDAAMCKYFCANAAFEVVDSAMQVLGGVGIAGNHRISRFWRDLRVDRVSGGSDEMQILTLGRLREHECRPDKAFTPHPAVMRYINFSGANNGSSTHAEIRPLAGLRVVFSGIEIAGPFAGQMFAGPSIIPMYRKWAIGNQGKMNVMMFTIC

SEQ ID NO: 60481 - protein, 60 aa, Homo sapiens
  misc_feature (1)...(60): Xaa = X or * as defined in Table 2
SPRCTRPCNAGSDVRRGSASFXAGGAGYXTPRPGVWXSVGYGERQQRAPPADWSQRCGVD

SEQ ID NO: 60482 - protein, 1027 aa, Homo sapiens
  DOMAIN (287)..(313): Dihydrodipicolinate synthetase proteins domain identified by eMATRIX, accession number BL00665F, p-value=4.600e-23, raw score of 18.54
  DOMAIN (379)..(585): Acyl-CoA dehydrogenase domain identified by PFam, accession name Acyl-CoA_dh, E-value=3.6e-119, PFam score of 409.0
MIEHPRRRDNYRQSGPPVADKPTTKGEPLISDIVSDAQQANLLIPVDETPPVINDEQSTSTPLTTAQTMALAAVADKNTTKDEKADDLNEDVTASLSALFAMLPGFDNTPKVTDAPSTVLPTEKPTLFTKLTSEQLTTAQPDDAPGTPAQPLTPLVAEAQSKAEVISTPSPPSISGVTRSKMRQREWLVLPPEDSLVIRRSNKTSQLPAFNVPLSAAKAAASKPWRASNTACRNSRPSKVCSAEGEQWFSASGRGEIHSQSPARDMAQMCKLAAEGHFAEARVINQRLMPLHNKLFVEPNPIPVKWACKELGLVATDTLRLPMTPITDSGRETVSGDETYLEAAPLAELHAPAGMILPVTSGDYAIPVTNGSGAVGSYSAITEPGAGSDVGSLKTTYTRRNGKIYLNGSKCFITSSAYTPYIVVMARDGASPDKPVYTEWFVDMSKPGIKVTKLEKLGLRMDSCCEITFDDVELDEKDMFGREGNGFNRVKEEFDHERFLVALTNYGTAMCAFEDAARYANQRVQFGEAIGRFQLIQEKFAHMAIKLNSMKNMLYEAAWKADNGTITSGDAAMCKYFCANAAFEIRGHFKFRHILFAEAEKFLFAQCFTFIQHHKCFDGFIANRIFNTHNHDVLNFRVRGDNIFQLHAGDILAATFNHIAAAIDEIKKVLFVAVSGIARVVDIDDAVARHLHGVRQGINLPLRLEGEIVGVIGLTGEPENLRKYGELVCMTQFKDKSARYAENINAGLFDYPVLMAADILLYQTNLVPFGKVVFLNNNRYNCDICLELRDLLIALESRLHQKHKLDAAAHLQYEQARDKVIKKMAENIPEILVDELKNADINRRVNTLELTDNQGENLTFVLTLHDGSKCELVVNELQIEMLARAIIHAINNAEMRELALRITSLLDFLPLYDVDCQDNGNLEYDTYSQPEWKHNLFDHYLAVLYRFKDESGKEQFSGAVVKTREATPAKHTHGPTRGTVMTRRHPVGTPSQDHSRAHLRGRGPWTPTGYHTCGEHRKGDNRGETEQ

SEQ ID NO: 60483 - protein, 53 aa, Homo sapiens
  misc_feature (1)...(53): Xaa = X or * as defined in Table 2
TNAACNRQSGLINQWMKQTVKMEVTASGTVISVINPVATKLRRXRVFPAPCCG

SEQ ID NO: 60484 - protein, 139 aa, Homo sapiens
  misc_feature (1)...(139): Xaa = X or * as defined in Table 2
QRRATGDLRLPTRXTARRGGRCDSXSSRRWHRAFTGACREISRQQNRRHRQRPAGGVALVGSEXTSGILAGQRHYRVYRAGYRRSPPAGYAPDXSDXRPVDGRHECGRRPVWRRENVPATGGQIGARHETGGGLPRTVY

SEQ ID NO: 60485 - protein, 1067 aa, Homo sapiens
  DOMAIN (96)..(144): METHYLTRANSFERASE METHIONINE 5-METHYLTET domain identified by eMATRIX, accession number PD02509C, p-value=4.090e-32, raw score of 13.21
  DOMAIN (335)..(425): Domain of unknown function DUF27 domain identified by PFam, accession name DUF27, E-value=0.0008, PFam score of -1.4
MGIVNAGQLAIYDDLPAELRDAVEDVILNRRDDGTERLLELAEKYRGSKTDDTANAQQAEWRSWEVNKRLEYSLVKGITEFIEQDTEEARQQATRPIEVIEGPLMDGMNVVGDLFGEGKMFLPQVVKSARVMKQGKEQGKTNGKMVIATVKGDVHDIGKNIVGVVLQCNNYEIVDLGVMVPAEKISRSKATAEREPLPVQLTGERVRRRKAKVPQQPAGYGADQQAITGKTLRQEDNHRQYQAHHRHRERERRPSIPLKKIVVSCAPSININKTITDGVNNRARRWPNPLKPINIVSTPESAIPTARLVAISLIGVPRDASPRVIILLGFLCNLNELFATVTHFHHRRTKTVPVAQFLLSLFKHLCRFKTIFPSFHITLKNATEHYSYLNSLRLVAANSYTSVAFPAISTGVYGYPRAAAAEIAVKTVSEFITRHALPEQMSWHKTRGRGRADDFACYWYAKSDILCDMCSKAQHDQLYQLSSSGVTKVSALPDSLTTPLGSLWKLYVYAWLEDTHQPEQPYQCRGNSPEEVYCCQAGESITRDTALVRSCGLYFAPQRLHIGADVWGQYWQQRQAPAWLASLTTLKPETSVTVKSLLDSLATLPAQNKAQEVLLDVVLDEAKIGVASMLGSRVRVKTWSWFADDKQEIRQGGFAGWLTDGLVARFLGSLLIAPRVSDPSRLISALRVLALLTLLFAVAFWAGAHVAWLMLVMIGFNPLFLTTVRLWGSVAFVIGSALTGKLVTMFDYRVILALLTLGVASMLLGFLIRPTIQPQGASRQQESTGLYRQYDMFAKCAFNTITTGETNTAAGIKTHIAHRPLHIINNSNSRHWHRCKTGEFSMSELNDLLTTRELQRWRLILGEAAETTLCGLDDNARQIDHALEWLYGRDPERLQRGERSGGLGGSNLTTPEWINSIHTLFPQQVIERLESDAVLRYGIEDVVTNLDVLERMQPSESLLRAVLHTKHLMNPEVLAAARRIVCQVVEEIMARLAKEVRQAFSGVRDRRRRSFIPLARNFDFKSTLRANLQHWHPQHANKGARRGFSGQTCLHRMVCRYEQTGHQSDQT

SEQ ID NO: 60486 - protein, 79 aa, Homo sapiens
FSLRLIMHPTGPHLGPDVLFRESNMKVTLTFNEQRRAAYRQQGLWGDASLADYWQQTARAMPDKIAVVDNHGASYTYSA

SEQ ID NO: 60487 - protein, 41 aa, Homo sapiens
  misc_feature (1)...(41): Xaa = X or * as defined in Table 2
TTSVQRTFLPDTYXAPTPVLLPARKATAARKLHRFSGRQDR

SEQ ID NO: 60488 - protein, 119 aa, Homo sapiens
  misc_feature (1)...(119): Xaa = X or * as defined in Table 2
TSLKVVTPALRSMPSVPINNLSKVKCSKAFSASCPXNEADFLRNVPPGIRIVCSLSSSDSALTICRLLVITVMLLKRESRGTICKTVLPASRMIESPSWIKLTAASAISSFLWVLMSVL

SEQ ID NO: 60489 - protein, 111 aa, Homo sapiens
  misc_feature (1)...(111): Xaa = X or * as defined in Table 2
WSKMSRAVRPSDWESWTQTREVVRQTVRCRPDPPSAAVCLTASSPANCGIPIGXXMLAEILAXRAVRPSDWESWTQTREVVRQTVRCRPDPPSAAVCLTASSPANCGIPIG

SEQ ID NO: 60490 - protein, 325 aa, Homo sapiens
  DOMAIN (137)..(152): Domain of unknown function domain identified by eMATRIX, accession number PF00990C, p-value=9.775e-10, raw score of 10.17
  DOMAIN (58)..(148): Protein of unknown function DUF24 domain identified by PFam, accession name DUF24, E-value=2.6e-25, PFam score of 97.5
MGSLHRFVLCLNTLTPKLTFSKYVQKGKYEMSQVSLSQQLKEGNLFAEQCPSREVLKHVTSRWGVLILVALREGTHRFSDLRRKICGVSEKMLAQYLHALEHDGFLNRIAYPAVPAHVEYNLTPLGEHAFYDNVRSSDYVFRYGGDEFIIVLTEASENETLRTAERIRSRVEKTKLKAANGEDIALSLSIGAAMFNGHPDYERLIQIADEALYIAKRRGPHLGPDVLFRESNMKVTLTFNEQRRAAYRQQGLWGDASLADYWQQTARAMPDKIAVVDNHGASYTYSAEDYDTSTASPFVSSPERSLQEEKYGCFCPTPQAVSPYG

SEQ ID NO: 60491 - protein, 254 aa, Homo sapiens
MVRDAVSATERTSDDDFEQRFTRRCRRRGTAPADRVIEERIRFQRRQQKAGISPQQHRQHQHQCFQSAMNGRHEAQNLLHDPQLRQPALLQGKQIMFKDFRQPQHQHHHVELKQHHPHRHHRGKTVVEHQLPEGPRSCQADVADAAVSCTLPAGKDRPVLLELLAGATNHRAGASQYVEGQPPDIRPTTPVDAALTGLCLAPRAFRFTRQSLLTRSSGEACHGGQEGFFDRSIDPKTAAEDGKGGPRWIRPIFL

SEQ ID NO: 60492 - protein, 244 aa, Homo sapiens
MLNNSAANAAARRVALDSLLFKLVGSLIILPFVHLLAETMGKLSLPKAELVIYFHVFYNLVRCLVMLPFVDPMARFCKTIIRDEPELDTQLRPKHLDVSALDTPTLALANAARETLRIGDAMEQMMEGLNKVMHAFWHQRSGQSREAIHMYGPDYGFDTTINKFNWETLIASRTAYIEFPQLNQGLGRNLGNASTIRRSCLVSFVSKPPMSNKQADQRSAARRRRRCCGNRPPFYGGKGINSHE

SEQ ID NO: 60493 - protein, 152 aa, Homo sapiens
  misc_feature (1)...(152): Xaa = X or * as defined in Table 2
LGAIFLAGALFAAAWLADFRLGLGARLYRYGADWFCADGGMSAEELKFISENGAVVDMDHKKPGSAAASGPKLHYIKQLLSNRMMLGVFFGQYFINTITWFFLTWFPIYIGNVVSDNRXYVAQITFITWIKTYGRCPSFQRDGDGFVNRCLI

SEQ ID NO: 60494 - protein, 627 aa, Homo sapiens
  DOMAIN (509)..(545): Bacterial regulatory proteins deoR family proteins. domain identified by eMATRIX, accession number BL00894A, p-value=3.500e- 20, raw score of 22.25
  DOMAIN (505)..(548): Bacterial regulatory proteins, deoR family domain identified by PFam, accession name deoR, E-value=6.2e-12, PFam score of 46.1
  misc_feature (1)...(627): Xaa = X or * as defined in Table 2
RRNYQRQQKKRGSEGAGRPDRRSRISAAYSPRSEFNNAAVTEHYXNRFXTLVPRSRHANADTVTREAVNQVIALLDSGALRVAEKIDGLPTNQMQASRRAKEEEVHLTGQPSRVQSPPRRCEEKQYMVLMIVSGRSGSGKSVALRALEDMGFYCVDNLPVVLLPDLARTLADREISAAVSIDVRNMPESPEIFEQAMSNLPDAFSPQLLFLDADRNTLIRRYSDTRRLHPLSSKNLSLESAIDKESDLLEPLHGFPDYDTVGFSCKRRIDYVCRIKHSRRIRQVVLLNFAKSGAFSTTRGTDDKTRRSLLVTLVRIFCVRVIFAYDIRDGIHVRIIQINSKSGKVGSKHNSGYSAAKFGGVGLTQSLALDLAEYGITVHSLMLGNLLKSPMFQSLLPQYATKLGIKPDQVEQYYIDKVPFKRGCDYQDVLNMLLFYASPKAVVLAPDSRSMSPAVSGRFKPRVVVAIALDDQQRIVDTLFMKGLTVFARPQKIPAITGRHSGATLQKQGKCSVEELAQYFDTTGTTMRKDLVILEHAGTVIRTSGGVVPDSPPHTRRDPRRFSMAFPWFDNIRSAEFHHVTTLLAEIPRQQNDIHRPAHAAAAPKVETRSGDETNRRWNRPAQHLFA

SEQ ID NO: 60495 - protein, 50 aa, Homo sapiens
  misc_feature (1)...(50): Xaa = X or * as defined in Table 2
EKVPVSIGPGGMQELPMQSPDRRSAGKPGPASRAGRXTGGGAFSTKRDYR

SEQ ID NO: 60496 - protein, 161 aa, Homo sapiens
  misc_feature (1)...(161): Xaa = X or * as defined in Table 2
SRRCSASINQRPRPGHEKMVSVRIAPASNVPTCRPITVTTGSIALRSAWTIITRMRVSPLARAVRMXSSPSTSSIEERVIRTMTASGIVPSTMAGKIIWATASIKLPSSPQMAVSISIKPVNGLESSRNTISLTRPETGVRFQCTETSMISIMPHQKIGIE

SEQ ID NO: 60497 - protein, 683 aa, Homo sapiens
  DOMAIN (116)..(129): Pyridine nucleotide-disulphide oxidoreductases class-I domain identified by eMATRIX, accession number BL00076B, p-value=8.615e- 17, raw score of 10.27
  DOMAIN (508)..(677): Bacterial regulatory proteins, deoR family domain identified by PFam, accession name deoR, E-value=1.2e-83, PFam score of 291.3
GTDTISAPTAESRKRVSLTGIDIGNRHDVMAFQVRREVFGITEVAGNQRQVANHQTLCMYLRRFFNGVIGADIANMGISKSNDLNENRKDHGGIASINRAAMYGQKCALIEAKELGGTCVNVGCVPKKVMWHAAQIREAIHMYGPDYGFDTTINKFNWETLIASRTAYIDRIHTSYENVLGKNNVDVIKGFARFVDAKTLEAVVRTTRIFRGVEYGIDSDGFFALPALPERVAVVGAGYIAVELAGIPAEQVFPGAQGLLEGLTKTGGDTAKYALENKLVDALASSAEIEKALTKEFGWSKTDKNYRAISYYDYALKTPADTGDSIGVVFANGAIMDGEETQGNVGGDTTAAQIRDAGLDPKVKAIVLRVNSPGGSVTASEVIRAELAAARAAENSLDSIGVHTDGVSTSPLADVSITRSLPPEAQLKMHVNIENGFKALQPGCEARNSPGAFCKFARAHLDGGGGGDIPGVVAALPAHDAKPSSVLYYNCSCFPVTQVITPMKPRQRQAAILEYLQKQGKCSVEELAQYFDTTGTTIRKDLVILEHAGTVIRTYGGVVLNKEESDPPIDHKTLINTHKKELIAEAAVSFIHDGDSIILDAGSTVLQMVPLLSRFNNITVMTNSLHIVNALSELDNEQTILMPGGTFRKKSASFHGQLAENAFEHFTFDKLFMGTTASISMRA

SEQ ID NO: 60498 - protein, 82 aa, Homo sapiens
  misc_feature (1)...(82): Xaa = X or * as defined in Table 2
LIRKVSTXSVLMKAFLRIAXKDCERLGLKCFWSGSEKGCPLVNTNAFGGHCEHHQWVSSVSRVRVSQSAGGCPLFNILLNTV

SEQ ID NO: 60499 - protein, 100 aa, Homo sapiens
  misc_feature (1)...(100): Xaa = X or * as defined in Table 2
SVFSHXAKKIWKGVSQRALGQNSRGSGSGCQASWTIRFPVGFHTDGTRLRRNPGMQAFLGPVARFLALEARSLDCAFSSSLLFKRKLSGRWGRASRGTKL

SEQ ID NO: 60500 - protein, 633 aa, Homo sapiens
  DOMAIN (286)..(316): Glycosyl hydrolases family 2 proteins domain identified by eMATRIX, accession number BL00719G, p-value=2.688e-22, raw score of 25.30
  DOMAIN (2)..(318): Glycosyl hydrolases family 2 domain identified by PFam, accession name Glyco_hydro_2, E-value=0.00019, PFam score of -271.4
  misc_feature (1)...(633): Xaa = X or * as defined in Table 2
MTEKVKQQPAPVTASDEIDIGRLVGTVIEARWWVIGITTVFALCAVVYTFFATPIYSADALVQIEQNSGNSLVQDIGSALANKPPASDAEIQLIRSRLVLGKTVDDLDLDIAVSKNTFPIFGAGWDRLMGRQNETRRGFSARGTGQMLKKEGVTLMVEAIHASPGSEFTVTKYSTLGMINQLHNSLTVTENGKDAGVLSLTYTGEDRYTNHAGVVNTMIIIAATHNLVFENNSCEYAHPMGNAPAGLTEYQNVFYKHDRIQGHYVWEWRDHGIQAQDDHGNVWYKFGGDYGDYPNNYNFCLDGLIYSDQTPGPGLKEYKQVIAPVKIHARDLTRGELKVENKLWFTTLDDYTLHAEVRAEGETLATQQIKLRDVAPNSEAPLQITLPQLDAREAFLNITVTKDSRTRYSEAGHPIATYQFPLKENTAQPVPFAPNNARPLTLEDDRLSCTVRGYNFAITFSKMSGKPTSWQVNGESLLTREPKINFFKPMIDNHKQEYEGLWQPNHLQIMQEHLRDFAVEQSDGEVLIISRTVKPRGPARCPDSSVGTTYCTENNPPFDNGLLNAQLLQQAKPFVDERQSKXFGCHSPSYSCLWLSIIGLKKLIFGSRVSSDSPFTCQDVGLPLIFEKVIAKL

SEQ ID NO: 60501 - protein, 174 aa, Homo sapiens; identical to SEQ ID NO: 32377
  DOMAIN (104)..(121): Zinc finger, CCHC class domain identified by PFam, accession name zf-CCHC, E-value=0.057, PFam score of 16.2

SEQ ID NO: 60502 - protein, 917 aa, Homo sapiens
  DOMAIN (770)..(787): Zinc finger C2H2 type, domain proteins. domain identified by eMATRIX, accession number BL00028, p-value=4.375e-15, raw score of 16.07
  DOMAIN (600)..(902): Zinc finger, C2H2 type domain identified by PFam, accession name zf-C2H2, E-value=1.5e-87, PFam score of 304.3
NNMPAPVTGSDEIDIGRLVGTVIEARWWVIGITTVFALCAVVYTFFATPIYSADALVQIEQNSGNSLVQDIGSALANKPPASDAEIQLIRSRLVLGKTVDDLDLDIAVSKNTFPIFGAGWDRLMGRQNETVKVTTFNRPKEMADQVFTLNVLDNKNYTLSSDGGFSARGQAGQMLKKEGVTLMVEAIHASPGNRYCQDVKRALFWPRRQYALRHARGSHIRRCSRGLHQRQVHAANGKSNPNRRPPPRVNRGTPRWAEASEVIRQCQSSAAKPRISGKESVREPWARVPGALGVAARRAGQSDSQWGPTQMGHGLGGILGCRHSLAQWPDFWHLKQDPEGGGPVGMPDHCGLGILKFLCAGEQTEKKKHNKKHNRGQEKKRRGRKRQQQQARSRERRRRGHGVTGVGRGGRESGFEDYSPHSDKPIKVVGSSTRGTAATRHLQRVVKSRENGRRCTLNATAKIIEHIGTETHSSGDIFAADVLVISNFAVNIQVNGWALYAHPCFQETYDALVAEVETLKGKDPENYQRKAATKLLAVVHKVIEEHITVNPSSPAFRHGKSLGSGKNKDWSRVKFGAGRYRLFFRYSEKEKKIHTGGKPYKCEECGKAFNHSCSLTRHKKIHTGEKPYKCEECGKAFKHSSTLTTHKRNHTGEKPYKCDKCGKAFMSSSTLSKHEIIHTEKKPYKCEECGKAFNRSSTLTTHKIIHTGEKPYKCEECDKAFKYSYTLTTHKRIHTEDKPYKCEECGKAFKYSSTLTTHKRIHTGEKPYKCEECGKAFKRSSDLTTHKIIHTGEKPYKCEECGKAFKYSSNLTTHKKIHTGERPYKCEECGKAFNQSSILTTHRRIHTGEIFYKCEECGKACKCSSNLTTHKKIHTGEKPYKCEECGKAFNRSSNLTTHKRIHTGEKPYKCEECGQRL

SEQ ID NO: 60503 - protein, 116 aa, Homo sapiens
SMAKCPLRKNQGPVRSCGAWSGCLWLPSPSGTPWRSSLWILLLFSQISQLLSLLHQGQFQPKPNHRGNKYLAKPGGSRSAIPDTDGPSARAGGQTDPEQEEGPLDPEEDLSVKQLL

SEQ ID NO: 60504 - protein, 52 aa, Homo sapiens
  misc_feature (1)...(52): Xaa = X or * as defined in Table 2
XSAIPDTDGPSARAGGQTDPEQEEGPLDPEEDLSVKQLLEEELSSLLDPSTX

SEQ ID NO: 60505 - protein, 317 aa, Homo sapiens
  DOMAIN (22)..(33): RNase H domain identified by eMATRIX, accession number PF00075D, p-value=7.000e-09, raw score of 10.71
MYKVPEQVLEKVTVPKQICLLQYVDDLLISGKDIKEVGDFSTHILNHLQCEGLLVSKGKIQYVEPEAKYLGYLISAEKPFHLFINVNNGVALGMLTQEHGGCQQPVAFLSKVLDPLTHRWPQGIQSIAATAVLVKESRKVTFGGKLTVIERKRHNRYSVIDGETLEEVESGRLPNDWSAQTCELFALSQALGHLQSQGYTDSILAHIGKPEELGPAGMRTPAGLNGAQAGVQWRDLGSLQPPPPSRLPWLPKMPRLQPLPGRHPIWEAPEIQATLSLSQHTTPFYVPPKNMLISGCPPLPQTPAISATEPAEKKRRN

SEQ ID NO: 60506 - protein, 1242 aa, Homo sapiens
  DOMAIN (42)..(76): Bacterial regulatory proteins marR family proteins. domain identified by eMATRIX, accession number BL01117, p-value=6.400e-28, raw score of 26.15
  DOMAIN (7)..(112): MarR family domain identified by PFam, accession name MarR, E -value=2.1e-37, PFam score of 137.7
MLKAQGINETLFMALITLESQENHSIQPSELSCALGSSRTNATRIADELEKRGWIERRESDNDRRCLHLQLTEKGHEFLREVLPPQHNCLHQLWSALSTTEKDQLEQITRKLLSRLDQMEQDGSEERLCLAAHRLGCEEPLCRAAQSGNHSPSIQPAIQPAIQPANQLSIHNLWTQFRHSTKIPVEWVNGEWLNGRMPGDHHEWQCNYQPAIQPAIQPANQLSIHNLWTQFRHSTKIPVEWVNGEWLNGRMPGDHHEWQCNYQPAIQPAIQPANQLSIRNLWTQFRHSSKIPVEWVNGEWLNGRMPGDHHEWQCNYQPAIQPAIQPANQLSIHNLWTQFRHSTKIPVEWVNGEWLNGRMPGDHHEWQCNYQPAIQPAIQPANQLSIHNLWTQFRHSTKIPVEWVNGEWLNGRMPGDHHEWQCNYQPAIQPAIQPANQLSIHNLWTQFRHSTKIPVEWVNGEWLNGRMPGDHHEWQCNYQPAIQPAIQPANQLSIHNLWTQFRHSTKIPVEWVNGEWLNGRMPGDHHEWQCNYQPAIQPAIQPANQLSIHNLWTQFRHSTKIPVEWVNGEWLNGRMPGDHHEWQCNYQPAIQPAIQPANQLSIHNLWTQFRHSTKIPVEWVNGEWLNGRMPGDHHEWQCNYQPAIQPAIQPANQLSIHNLWTQFRHSTKIPVEWVNGEWLNGRMPGDHHEWQCNYQPAIQPAIQPANQLSIHNLWTQFRHSTKIPVEWVNGEWLNGRMPGDHHEWQCNYQPAIQPAIQPANQLSIHNLWTQFRHSTKIPVEWVNGEWLNGVMPGDQPEWQCNYQPAIQPAIQPANQLSIHNLWTQFRHSTKIPVEWVNGEWLNGRMPGDHQEWQCNYQPAIQPAIQPANQLSIHNLWTQFRHSTKIPVEWVNGEWLNGRMPGDHKEWQCNYQPAIQPAIQPANQLSIHNLWTQFRHSTKIPVEWVNGEWLNGRMPGDHQEWQCNYQPAIQPAIQPANQLSIHNLWTQFRHSTKIPVEWVNGEWLNGRMPGDHKKMAMQLSATPSGFEEGPPSSQYPWAIVWGPTVSREDGGDPNSANPGFLDYGFAAPHGLATPHPNSDSMRGDGDGLILGEAPATCGHSCSGAVGKELVKPFAFIGSLEHLNAPLRTLSPPYPQNTVTLKFPHKIAYKVWALGGRSLNHLLSSWKTGAWKTLTTCSQEEDYRTLTNYIAFSQFVRPLIAAKNPKIAVSKMMMVLDAKWREFSTNNPFKGSSGASVAVRQQQR

SEQ ID NO: 60507 - protein, 812 aa, Homo sapiens
  DOMAIN (136)..(191): Domain present in ZO-1 and Unc5-like netrin receptors domain identified by eMATRIX, accession number PF00791B, p-value=4.165e- 13, raw score of 28.49
  DOMAIN (99)..(304): Ank repeat domain identified by PFam, accession name ank, E- value=1.5e-26, PFam score of 101.6
MLRSLRLQQEWLEWEDRRRAAAQQCRSRRCPSSPRARLTRPHRSCRDPAVHQALFSGNLQQVQALFQDEEAANMIVETVSNQLAWSAEQGFWVLTPKTKQTAPLAIATARGYTDCARHLIRQGAELDARVGGRAALHEACARAQFDCVRLLLTFGAKANVLTEEGTTPLHLCTIPESLQCAKLLLEAGATVNLAAGESQETPLHVAAARGLEQHVALYLEHGADVGLRTSQGETALNTACAGAEGPGSCRRHQAAARRLLEAGADARAAGRKRHTPLHNACANGCGGLAELLLRYGARAEVPNGAGHTPMDCALQAVQDSPNWEPEVLFAALLDYGAQPVRPEMLKHCANFPRALEVLLNAYPCVPSCETWVEAVLPELWKEHEAFYSSALCMVNQPRQLQHLARLAVRARLGSRCRQGATRLPLPPLLRDYLLLHMKRSRCRDRPQPPPPDRREDGVQRAAELSQSLPPRRRAPPGRQRLEERTGPAGPEGKEQPPALASQSAEIAASARLPPRLGSEERLCLAAHRLGCEPPLCLAAQSGNLGDNGLPAGRQELKQGTHEETTALAQVRAEGLPVLVWMETEDLQVMSFRISLSRHGPKPSHPKSDSFSLAGSKSLLPFKDLKHTVNDEEGRWSAIPDTDGPSARAGGQTDPEQEEGPLDPEEDLSVKQLLEEELSSLLDPSTGLALDRLSAPDPAWMARLSLPLTTNYRDNVISPDAAATEEPRTFQTFGKAEAPELSPTGTRLASTFVSEMSLTAGDAAGTALQHARGGRLRGAAAALGLREDPQFRLGHQCSLRHESARGPRWKDGD

SEQ ID NO: 60508 - protein, 270 aa, Homo sapiens
  misc_feature (1)...(270): Xaa = X or * as defined in Table 2
PDLHCQKKHPTLCSGYWPTFRTPVHYAAFSXXHALGHLAFSEASLHSHRGTQALTTQKKSPAKSPTAATTETRVMRKISHGTRDPPGFASLMQXMHYGKLCAFQSELLFQSLQRSHWTQSWWLCWPHWRLCWTQNWWQCWPHWTLCWTQSWWLCWPHWRSCWTQRWWLCWPHWTLCWTQSWWLCWSHWRSCWTQSWWLCWPHWRLCWTQSWWLCWPHWRSCWTQSWWLCWPHWRLCWSQSWWLCWPHWRLYWTQSWWLCWPHWRVCWTQN

SEQ ID NO: 60509 - protein, 415 aa, Homo sapiens
  DOMAIN (152)..(191): Tau and MAP proteins tubulin-binding domain proteins domain identified by eMATRIX, accession number BL00229A, p-value=7.545e- 09, raw score of 23.57
  misc_feature (1)...(415): Xaa = X or * as defined in Table 2
KMPPWPPGSPGPLGCSAWAEAPPAHCPDVLLHLHPACPHIQAPCGTGAPGTGLAAAADSEPLGSSAPPAGRPCPQAAAACGLAPPLPRGWCPPPTSSWMGRRLQSLSAHPTSPAPLLAAPTAVCSCSRCSAPRSRCVARPAARTGLPTPAPASSPAPATSPAPAESPAATASHPVAEASPAPGAPPPRPAASPSPAASPAPPAASPVLTASPPLPAASPALAASPVHTASPPVHVASPPVHTASPPVHTASPPVHVASPPVHVASPPVSCSGDSTSDCFPPQPGAVFPHSLVSFLRWLVSSCSCSTLDGPAGGCGARGSAVWFLSLNKLLPMLLYQMYLMLLLLLRCANQXIDVFSELTDYCGAXIQGYCXFLVLAIPRXVVTTRSGCVRATAIDFLFPVSSCWNARALPLPICF

SEQ ID NO: 60510 - protein, 660 aa, Homo sapiens
  DOMAIN (31)..(86): Sodium:solute symporter family proteins domain identified by eMATRIX, accession number BL00456A, p-value=1.000e-40, raw score of 22.59
  DOMAIN (54)..(488): Sodium:solute symporter family domain identified by PFam, accession name SSF, E-value=8.5e-272, PFam score of 916.3
SVPLEDTAVTRPVETHELIRNAADISIIVIYFVVVMAVGLWAMFSTNRGTVGGFFLAGRSMVWWPIGASLFASNIGSGHFVGLAGTGAASGIAIGGFEWNALVLVVVLGWLFVPIYIKAGVVTMPEYLRKRFGGQRIQVYLSLLSLLLYIFTKISADIFSGAIFINLALGLNLYLAIFLLLAITALYTITGGLAAVIYTDTLQTVIMLVGSLILTGFAFHEVGGYDAFMEKYMKAIPTIVSDGNTTFQEKCYTPRADSFHIFRDPLTGDLPWPGFIFGMSILTLWYWCTDQVIVQRCLSAKNMSHVKGGCILCGYLKLMPMFIMVMPGMISRILYTEKIACVVPSECEKYCGTKVGCTNIAYPTLVVELMPNGLRGLMLSVMLASLMSSLTSIFNSASTLFTMDIYAKVRKRASEKELMIAGRLFILVLIGISIAWVPIVQSAQSGQLFDYIQSITSYLGPPIAAVFLLAIFWKRVNEPGAFWGLILGLLIGISRMITEFAYGTGSCMEPSNCPTIICGVHYLYFAIILFAISFITIVVISLLTKPIPDVHLYRLCWSLRNSKEERIDLDAEEENIQEGPKETIEIETQVPEKKKGIFRRAYDLFCGLEQHGAPKMTEEEEKAMKMKMTDTSEKPLWRTVLNVNGIILVTVAVFCHAYFA

SEQ ID NO: 60511 - protein, 496 aa, Homo sapiens
  DOMAIN (390)..(440): Sugar transport proteins domain identified by eMATRIX, accession number BL00216B, p-value=1.878e-16, raw score of 27.64
  DOMAIN (100)..(489): Sugar (and other) transporter domain identified by PFam, accession name sugar_tr, E-value=0.00046, PFam score of -78.2
MAFRMMRYSIAAMHRHLEADHDKLPLVVPILFYQGEATPYPLSMCWFDMFYSPELARRVYNSPFPLVDITITPDDEIMQHRRIAILELLQKHIRQRDLMLLLEQLVTLIDEGYTSGSQLVAMQNYMLQRGHTEQADLFYGVLRDRETGGESMMTLAQWFEEKGIEKGIQQGRQEVSQEFAQRLLSKGMSREDVAEMANLPLAEIDKVKNNEHKTTLPLRKAKKSSGEPDVVLWASNDFESTCATLDYLIVKSAPDNAHYQGNEEMMIKLFGEPVAFDEEQPQQTRFRDLFNRRHFPFVLFVAAIWTCQVIPMFAIYTFGPQIVGLLGLGVGKNAALGNVVISLFFMLGCIPPMLWLNTAGRRPLLIGSFAMMTLALAVLGLIPDMGIWLVVMAFAVYAFFSGGPGNLQWLYPNELFPTDIRASAVGVIMSLSRIGTIVSTWALPIFINNYGISNTMLMGAGISLFGLLISVAFAPETRGMSLAQTSNMTIRGQRMG

SEQ ID NO: 60512 - protein, 166 aa, Homo sapiens
LFETEFMPEMAGIRSTLIKEKNMITNYEATVVTTDDIVHEVNLEGKRIGYVIKTENKETPFTVVDIDGPSGNVKTLDEGVKKMCLVHIGKNLPAEKKAEFLATLIAMKLKAKKSSGEPDVVLWASNDFESTCATLDYLIVKSGKKLSSYFKAVATNFPVVNDLPAE

SEQ ID NO: 60513 - protein, 144 aa, Homo sapiens
  misc_feature (1)...(144): Xaa = X or * as defined in Table 2
SDPGFRHGKARITDPRGQPGRRLQGGSSEGNGSDMKAARKVSGNKHSTSSHQHAVWCPGVPSXSGKAWAADQRFVPRILGKGRGHVDAAXLSWKCRNHLSSVSLNGENQRFVGDARYRTRLQRGSANLFKRQRCGTLHQNLELL

SEQ ID NO: 60514 - protein, 731 aa, Homo sapiens
  DOMAIN (560)..(614): chorismate binding enzyme domain identified by PFam, accession name chorismate_bind, E-value=1.3e-25, PFam score of 91.4
MELNITSKSNPFGDPTAENDKKMLSNAFIETADFRTLIETDDRTIVVGRRGTVNTTPQIELPGARILLVVGLDSQRICRTSTGAGTAGNTLAGHQRHTVGTGVAGIKATDNQRCVRNGIAAQHVTQHRPVGVGGGTAAPAEQFLVITEHAPVHVFTAWRFNKAQRECVRFIAKAFGQQWGIRHVVEGKFQHCQRINVSLTRTITREKTSPPVKTTGDVLGTAGFLRNTRQGVTRADLYAIFQLNNRFTRQEVLRWHIGTWDQNVVTLSINDFQCRTQIFTTCGTFCGIQNHQRRQTGQFVGLTRNGLAVDHVSKAYKTAYFGDNRHGVRVPVCNGFAASNLFAIAFRQYRTVRYFVAFFSTTEFVDQFQFSITGSDNQFTAGVQTDFTLLSLMLGPSTDSHFQCRERGLLAPITDVVKRGALYIGWSAGANLACPTIRTTNDMPIVDPQGFDALNLFPLQINPHFTNALPEGHKGETREQRIRELLVVAPELTIIGLPEGNWITCLMRRLTRLIRPTGFTILILVPSFIFIRLFQHTVSHRTNQEFRRCISPRGSSRVVELEPFDRELFGGIVGWCDSEGNGEWVVTIRCAKLRENQVRLFAGAGIVPASSPLGARMSIPFTRWPEEFARRYREKGYWQDLPLTDILTRHAASDSIAVIDGERQLSYRELNQAADNLACSLRRQGIKPGEPALVQLGNVDELSLSFFALLELGVAPVLALFSHQRGGQQPG

SEQ ID NO: 60515 - protein, 996 aa, Homo sapiens
  DOMAIN (157)..(430): Molybdopterin binding domain in dehydr domain identified by PFam, accession name dehydrog_molyb, E-value=1.4e-61, PFam score of 218.0
MNKWSRLNHCSLLVINPENNNDKQFSLLLEEYRSLFGLASLRFQGDQHLLDIAFWCNEKGVSARQQLSVQQQNGIWTLVQSEEAEIQPRSDEKRILSNVAVLEGAPPLSEHWQLFNNNEVLFNEARTAQAATVVFSLQQNAQIEPLARNIHTLRRQRGSAMNNLVRENTASLRATDERLLLACGANMGISWNAPLSDGNLAELRGITLAEDGSLRIGSATTFTQLIEDPITQRHLPALCAAATSIAGPQIRNVATYGGNICNGATSADSATPTLIYDAKLEIHSPRGVRFVPINGFHTGPGKVSLEHDEILVAFHFPPQPKEHAGSAHFKYAMRDAMDISTIGCAAHCRLDNGNFSELRLAFGVAAPTPIRCQHAEQTAQNAPLNLQTLEAISESVLQDVAPHAAIGTHNQDRFFAHMRDAIQPRHSWQQYGKHLQLIQATNRGVSRTPRGDATVLIVNDKSQVEARPVVASQAIGDKWLISEGLKSGDQVIVSGLQKARPGEQVKATTDTPADTASNIQQLHRLRFLVQQTIRAAEPQTGQDPGTQVIEQNMNGIDYLMYMFFISDFGGSVTITLNFQCGTESDIAPVPVQNKLRLARGGVRRSSPAGIKDWKTRIGVNQTTLIVINRNAGRIVSTARQQCEGRPADRPEGLFHAFLRFFQQLLEQCTWFGVFTGQDHRGDDIRLPAGFFVGSDTVFFEYAFSHFTFFTGYAADISWPAVHVQGFAITGQFHHLFSTMPVFVLRVLCQTLFFQWLLSLRDRSHAAIQYALPSLCKVPMTADNDVCVFEGFFQPVTSRNLPEAYIWYPTLTLSDRQDFRCAGKSYEECHTRSRFTVPVKKGEVSCAVRSGETSSRVTVAYPVSEGDKVVSLIVPRGDGAILTATQNGYGKRTAVAEYPTKSRATKGVISIKVTERNGLVVGAVQVDDCDQIMMITDAGTLVRTRVSEISIVGRNTQGVILIRTAEDENVVGLQRVAEPVDEERSGYHRRQCRGRGR

SEQ ID NO: 60516 - protein, 60 aa, Homo sapiens
  misc_feature (1)...(60): Xaa = X or * as defined in Table 2
FALRYRQPVRHRWXFHLVQRHGRFSRASGATWPASAAAFAWPLLVCAPLSAASAAPLARL

SEQ ID NO: 60517 - protein, 940 aa, Homo sapiens
  DOMAIN (232)..(267): Folylpolyglutamate synthase proteins domain identified by eMATRIX, accession number BL01011A, p-value=2.680e-12, raw score of 21.00
  DOMAIN (232)..(439): Mur ligase family domain identified by PFam, accession name Mur_ligase, E-value=2e-19, PFam score of 78.0
MATTHLDVCAVVPAAGFGRRMQTECPKQYLSIGNQTILEHSVHALLAHPRVKLAGDSRFAQLPLANHPQITVVDGGDERADSVLAGLKAAGDAQWVLVHDAARPCLHQDDLARLLALSETSRTGGILAAPERDRICGTFMGGLAMLARQLGHEVTGSDANVYPPMSTLLEKQGIELIQGYDASQLEPQPDLVIIGNAMTRGNPCVEAVLEKNIPYMSGPQWLHDFVLRDRWVLAVAGTHGKTTTAGMATWILEQCGYKPGFVIGGVPGNFEVSAHLGESDFFVIEADEYDCAFFDKRSKFVHYCPRTLILNNLEFDHADIFDDLKAIQKQFHHLVRIVPGQGRIIWPENDINLKQTMAMGCWSEQESEFVKSRGVPEFSVLCGTGLVTIHVGGWERPPAPDAASWPRDDNTCPGSEHSSGPAGFAGCRFPFLSAPVTASGQPRVLSPVRCIPRVSRVFVRLVQRPCFTRRGSALEFGPWITISSADRRSYHLRVRSAESGPASEDSPVSSFGLTRNGLPVDHVSKAYKTAYFGDNRHGVRVPVCNGFAASNLFAIAFRQYRTVRYFVAFFSTTEFVDQFQFSITGSDNQFTAGVHNRLHVAELDATFVFHLDAGFSSRTRCRTTDVERTHGQLCTRFTDGLCRDNTDCFTLVDDVATRQSSLPAGHTTVRAAACCAERGYQQYPASERLQQLHDPVRDRAAALYVTTLIPSQVRYGDDWPTIQGPAKRLTKRIFATTSRCSSRCITRCYSNLALRSGDHCLESRQSEAGVTRLNGKSPAAVLAEVTTDWREEKTPVVMAGMVGSNVGWKVAPYLSVPACFSSIGEQLTSVGDNIWIIPGLCVSHDDNHNVMRGEETQLIGARALAPSSLYVMPEPMQMHRGRNTQGVILIRTAEDENVVGLQRVAEPFDEKDLDTIDGSAAEGDDEIAPEVDVDDEPEEE

SEQ ID NO: 60518 - protein, 74 aa, Homo sapiens; identical to SEQ ID NO: 35339
  misc_feature (1)...(74): Xaa = X or * as defined in Table 2

SEQ ID NO: 60519 - protein, 144 aa, Homo sapiens; identical to SEQ ID NO: 36215
  DOMAIN (42)..(62): RIBOSOMAL PROTEIN L5 SIGNATURE domain identified by eMATRIX, accession number PR00058B, p-value=1.529e-27, raw score of 8.75
  DOMAIN (25)..(144): Ribosomal L18p/L5e family domain identified by PFam, accession name Ribosomal_L18p, E-value=2.4e-45, PFam score of 164.1

SEQ ID NO: 60520 - protein, 117 aa, Homo sapiens; identical to SEQ ID NO: 53836
  DOMAIN (34)..(55): RIBOSOMAL PROTEIN L5 SIGNATURE domain identified by eMATRIX, accession number PR00058F, p-value=5.562e-11, raw score of 8.67

SEQ ID NO: 60521 - protein, 480 aa, Homo sapiens; identical to SEQ ID NO: 53835
  DOMAIN (331)..(351): RIBOSOMAL PROTEIN L5 SIGNATURE domain identified by eMATRIX, accession number PR00058D, p-value=8.744e-23, raw score of 9.34
  DOMAIN (259)..(359): Ribosomal L18p/L5e family domain identified by PFam, accession name Ribosomal_L18p, E-value=3.4e-07, PFam score of 30.4

SEQ ID NO: 60522 - protein, 124 aa, Homo sapiens
AGGAPGGTAQEPGGTPGPTEAICSTCTPIHSPCRTSPPETWLPSQPPMTPTLPSPHPLPRPVPEELYKKAHAAIRENPVYEKKPKKEVKKKRWNRPKMSLAQKKDRVAQKKASFLRAQERAAES

SEQ ID NO: 60523 - protein, 41 aa, Homo sapiens
KIYIPIFCRWNRPKMSLAQKKDRVAQKKASFLRAQERAAES

SEQ ID NO: 60524 - protein, 322 aa, Homo sapiens
  DOMAIN (62)..(82): RIBOSOMAL PROTEIN L5 SIGNATURE domain identified by eMATRIX, accession number PR00058B, p-value=1.529e-27, raw score of 8.75
  DOMAIN (45)..(197): Ribosomal L18p/L5e family domain identified by PFam, accession name Ribosomal_L18p, E-value=6e-58, PFam score of 205.9
  misc_feature (1)...(322): Xaa = X or * as defined in Table 2
RRWACRSLSSSGRRSLFRRMGFVKVVKNKAYFKRYQVKFRRRREGKTDYYARKRLVIQDKNKYNTPKYRMIVRVTNRDIICQIAYARIEGDMIVCATYAHELPKYGVKVGLTNYAAAYCTGLLLARRFLNRFGMDKIYEGQVELTGDEYNVESIDGQPGAFTCYLDAGLARTTTGNKVFGALKGAVDGGLSYPLTVPKRFPWFDDSXKPRNLIAEVHRKPHPWAQNVARLHAPTLMEEDEDAYKKQFVRQYVKNSVTPDMMEEMYKKAHAAIREESSSMEKKAQGKKFKKKRWNRPKMSLAQKKDRVAQKKASFLRAQERGC

SEQ ID NO: 60525 - protein, 680 aa, Homo sapiens
  DOMAIN (406)..(441): PROTEIN REGION YCF24 CHLOROPLAST LPP-AROD INTERG domain identified by eMATRIX, accession number PD02360C, p-value=5.065e- 32, raw score of 19.22
MQLSSSEPCVVILTEKEVEVSVNNHATFTLPKNYLAAFACNNNVIELSTLNHVLITHINRNIINDYLLFLNKNLTCVKPWSRLATPVIACHSPASATASARIIQSDISIGGCGRESPQQRDALALTLDSVRLVFVDGRYVPALSDATEGSGYEVSINDDRQGLPDAIQAEVFLHLTESLAQSVTHIAVKRGQRPAKPLLLMHITQGVAGEEVNTAHYRHHLDLAEGAEATVIEHFVSLNDARHFTGARFTINVAANAHLQHIKLAFENPLSHHFAHNDLLLAEDATAFSHSFLLGGAVLRHNTSTQLNGENSTLRINSLAMPVKKEVCDTRTWLEHNKGFCNSRQLHKTIVSDKGRAVFNGLINVAQHAIKTDGQMTNNNLLMGKLAEVDTKPQLEIYADDVKCSHGATVGRIDDEQIFYLRSRGINQQDAQQMIIYAFAAELTEALRDEGLKQQVLARIGQRLPGATFVLYATECWHLKKLGWTYKRRLECRNMRRKLHSYFSIFMIRGRYVQPIKSILDKATLRPEQINIISTAYTFFNVERHSLFHMETVVDASRMISDMARLMGALKAVVMATGFENPLSSVNEIETKLSALLGSETTGEILFDLLCANGPEWNRFVTLEMKYGRIMLDTAKIIDEQDVPTHILSKLTFTLRNHPEYLEASVLSPDDVRQVLSMDF

SEQ ID NO: 60526 - protein, 263 aa, Homo sapiens
SVSAFATGWSDIQRDCAQTRCFHQLREKIRGESRRALPAVPSGVWVMNPLLTDSRRQALRSASHWYAVLSGERVSPQQEARWQQWYEQDQDNQWAWQQVENLRNQLGGVPGDVASRALHDTRLTRRHVMKGLLLLLGAGGGWQLWQSETGEGLRADYRTAKGTVSRQQLEDGSLLTPDLRFYLQSAAVQQLLQAALDVVIAVQAVALLAARQAGVNREGKSAVCGILIERFIERSRCDINLCSKSGKRETGQRQQAQANGVNQ

SEQ ID NO: 60527 - protein, 216 aa, Homo sapiens
GLLLLLGAGGGWQLWQSETGEGLRADYRTAKGTVSRQQLEDGSLLTLNTQSAADVRFDAHQRTVRLWYGEIAITTAKDALQRPFRVLTRQGQLTALGTEFTVRQQDNFTQLDVQQHAVEVLLASAPAQKRIVNAGESLQFSASEFGAVKPLDDESTSWTKDILSFSDKPLGEVIATLTRYRNGVLRCDPAVAGLRLSGTFPLKNTDAILNVIAQTL

SEQ ID NO: 60528 - protein, 643 aa, Homo sapiens
  DOMAIN (147)..(194): Sigma-70 factors ECF subfamily proteins domain identified by eMATRIX, accession number BL01063B, p-value=2.750e-27, raw score of 27.35
MVGRPHKEAQGHNTRGPERQARVKQNRGPEDMAKRPVKNSPHVQGTAQDAPPGNRQAHSNTQTIQTGRAQVSKQGVGPEKHHQKEDRVSNTTTPTGAIIPHNQRNNPRNALEKAYLEMLALMPEGGAPSPEERESQLETLQLLDSMLDGLNGKTREAFLLSQLDGLTYSEIAHKLGVSISSVKKYVAKAVEHCLLFRLDGERVSPQQEARWQQWYEQDQDNQWAWQQVENLRNQLGGVPGDVASRALHDTRLTRRHVMKGLLLLLGAGGGWQLWQSETGEGLRADYRTAKGTVSRQQLEDGSLLTLNTQSAADVRFDAHQRTVRLWASSLRLGTEFTVRQQDNFTQLDVQQHAVEVLLASAPAQKRIVNAGESLQFSASEFGAVKPLDDESTSWTKDILSFSDKPLGEVIATLTRYRNGVLRCDPAVAGLRLSGTFPLKNTDAILNVIAQTLPVKIQSITRYWINISPLVFTFNLAALLDLQGLEKVLIRQEDGKANIVQQEVARTYLQTVMADAYPHLHVTAEKLLVSGLCVKLAAPDLPDYCMLLYPELRTIEGVLKSKMSGLGMPVQQPAGFGTYFDKPAAHYILKPQFAATLRPEQINIISTAYTFFNVERHSLFHMETVVDASRMISDMARLMGKSQP

SEQ ID NO: 60529 - protein, 257 aa, Homo sapiens
  DOMAIN (104)..(118): Response regulator receiver domain proteins domain identified by eMATRIX, accession number PF00072A, p-value=7.469e-09, raw score of 9.42
  DOMAIN (58)..(170): Response regulator receiver domain identified by PFam, accession name response_reg, E-value=6.9e-25, PFam score of 96.1
MGHHGLNDPAGESQKLRRIADSTVMEGANKRGNSSRLSDLASIPVIRQVIQRISNPEASIESLQERRFWLQSIRNLLIKNDIEILAELTEGGSAVQRVETLKPDIVIIDVDIPGVNGIQVLETLRKRQYSGIIIIVSAKNDHFYGKHCADAGANGFVSKKEGMNNIIAAIEAAKNGYCYFPFSLNRFVGSLTSDQQKLDSLSKQEISVMRYILDGKDRAPPTARATRLICVKTISRMTMPMSGRIRCTNSRGEPRLI

SEQ ID NO: 60530 - protein, 160 aa, Homo sapiens
  misc_feature (1)...(160): Xaa = X or * as defined in Table 2
NSSCRDPGYCPIIVSLNSSXGSLLQDMPGPSKVISEILATRGAVNITTVAYKSAVILSFTTASAVSLSSRNVIGPLFASQPSFTIHFSLFSHNGSAPLNAPDMANCFGLTALTSSLDERLFSRNSAGSCCGIRNCFISTLPPNTSTLTSVNSKGSSSVHG

SEQ ID NO: 60531 - protein, 924 aa, Homo sapiens
  DOMAIN (527)..(582): Fimbrial biogenesis outer membrane usher protein domain identified by eMATRIX, accession number BL01151, p-value=1.000e-40, raw score of 29.09
  DOMAIN (515)..(635): Fimbrial Usher proteins domain identified by PFam, accession name Usher, E-value=1.9e-71, PFam score of 250.8
MDSDSGRYREWHSQFSSSRSGKSKRLCAPRLSSTTGFYRSQPEVNDAITKAAKAKGAYSFYIVRQIDANQGGNQRITAFIYKKDAKKRIVQSPDVIPADSEAGRAALAAGGEAAKKVEIPGVATTASPSSEVGRFFETQSSKSGRYTVTLPDGTKVEELNKATAAMMVPFDSIKFSGNYGNMTEVSYQVAKQLSTRLACYQAHSSAKARKPIVWVRDAQHPSFSGALSLDAGQTLFTGGSVLPPSTLKFSVDGRDPTYFLFKGDLHAGEIGPVRVNGRWDGIRLRGNAWWPKQSLTVFQPLVPPDWKMNLRDGELYAQVAFSAAPEQGFRAGGHGVLKGGSAWMPDNQVNGVDFVLPFRFADGAWHLGTRGPVTLRIAEVINLVTAKNITADLQGRYPWTEEEPLLLTDVSVDVLSGCKINLVVDNGKIVRAEAAQGKTNQGTLCLKGYYGWDFINDTQILTPRLKTPMIRRQRGGKLEPVSWDEALNYVAERLSAIKEKYGPDAIQTTGSSRGSKLTLGETDFSSNIFDGFSYTGAALASDDRMLPWELRGYAPQISGIAQTNATVTISQSGRVIYQKKVPPGPFIIDDLNQSVQGTLDVKVTEEDGRVNNFQVSAASRPFLTRQGQVRYKLAAVTIGYSQDEQGLGYGLIMQQDDATTERFRWRVSIVGRDFTVSECLDPNPLQRWSIAAMWYVGATCADLVGYWLYDVEGGWRWMLGSAAIPCLLILIGRFELPESPRWLLRKGRVKECEEMMIKLFGEPVAFDEEQPQQTRFRDLFNRRHFPFVLFVAAIWTCQVIPMFAIYTFGPQIVGLLGLGVGKNAALGNVVISLFFMLGCIPPMLWLNTAGRRPLVIGSFAMMTLALAVLGLIPDMGIWLVVMVFAEYAFFCAGRVIGRASILMNSSRQISRLCRGGDYVLSVCI

SEQ ID NO: 60532 - protein, 462 aa, Homo sapiens
  DOMAIN (402)..(449): Bacterial regulatory proteins luxR family proteins. domain identified by eMATRIX, accession number BL00622, p-value=9.719e-27, raw score of 32.69
  DOMAIN (399)..(462): Bacterial regulatory proteins, luxR fami domain identified by PFam, accession name GerE, E-value=6.2e-24, PFam score of 92.9
MSQAWRHVRVVPATGEAEAVVPGCQIIRLTVSICPAFPFADGAWHLGTRGPVTLRIAEVINLVTAKNITADLQGRYPWTEEEPLLLTDVSVDVLGGNVLMKQLRMPQHDPALLRLNNLSSSELVSAVNPKQFAMSGAFSGALPLWLNNEKWIVKDGWLANSGPMTLRLDKDTADAVVKDNMTAGSAINWLRYMEISRSSTKIMTSSQDQIDAQRLKNTHDTAVGPGFEPSPKSQYWAFRKGELCTVFCTILAWNEWGWEERPLLLNNDADGPAIRNLLIKNDIEILAELTEGGSAVQRVETLKPDIVIIDVDIPGVNGIQVLETLRKRQYSGIIIIVSAKNDHFYGKHCADAGANGFVSKKEGMNNIIAAIEAAKNGYCYFPFSLNRFVGSLTSDQQKLDSLSKQEISVMRYILDGKDNNDIAEKMFISNKTVSTYKSRLMEKLECKSLMDLYTFAQRNKIG

SEQ ID NO: 60533 - protein, 39 aa, Homo sapiens
NGGNFSWHLHRIDDERQSTAERSSSVLADYVFYSANIAV

SEQ ID NO: 60534 - protein, 595 aa, Homo sapiens
  DOMAIN (379)..(426): Bacterial regulatory proteins luxR family proteins. domain identified by eMATRIX, accession number BL00622, p-value=8.347e-18, raw score of 32.69
  DOMAIN (376)..(431): Bacterial regulatory proteins, luxR famil domain identified by PFam, accession name GerE, E-value=2.4e-05, PFam score of 31.2
MACLAKGASVTLLHRPMTQELSISHRAVETEQVICDTSAVEVEAQRMKLILGHKSTQVETSGLKARQPVDPLLLTKFVDFCNRLCEVTRGGLKATAIKELCFTLAVIMVPRHPRSNRGQPLEADPVPNGLSTEHISSAEGQVDVAFALVEILAEQCAPHLGDQGGPVEETKPMLDLKDEQEFAKREHVPGKVNSRFTGTRPEGTTRAKSFALVCGLPSLGLSFSIFTVKGVNYEFRSRAHLSAPEVTARLAGPNPQNPPKVFAAGELSRGKACLSTGWGNRRIINLSLEKIRKDFVFINLSTDSLSEFINRDNEWLSAVKGKQVVLIAARKSEALANYWYYNSNIRGVVYAGLSRDIRKELVYVINGRFLRKDIKKDKITDREMEIIRMTAQGMQPKSIARIENCSVKTVYTHRRNAEAKLYSKIYKNAMKKKVLAIALVTVFTGMGVAQAADVTAQAVATWSATAKKDTTSKLVVTPLGSLAFQYAEGSKEALGAGLLDDETAVISLGTYIALMMNGKALPKDPVAYWPIMSSIPQTLLYEGYGIRKGMWTVSWLRDMLGESLIQDARAQDLSPEDLLNKKASCDRRAQLKPEK

SEQ ID NO: 60535 - protein, 130 aa, Homo sapiens
  DOMAIN (44)..(60): CBXX/CFQX SUPERFAMILY SIGNATURE domain identified by eMATRIX, accession number PR00819B, p-value=6.400e-10, raw score of 10.83
IALASSHCTANARFRITRCRTKEQRYALSQAKSIADELMTGCTNFAFSGKPGTGKNHLAALSGIACWKTFLMNLASARDEKRAVVLHQIVDRRTASMRSVGMLTNLNYEAMKTLLGERIMDRMTMNGGRW

SEQ ID NO: 60536 - protein, 262 aa, Homo sapiens
TCRPDKTRQASHQALCANCRMRRKRLIRPTVRHKPATAAGCGVNALSDLRLCSGSLAFGNDYPMRLGQLRALVKSLRFFFTRLAQHFVDLRIVQRTRNVIAQNGDFAPQRPQHFTGGKHCRANNKVNRKSRSHAHRRRNLWCDNRFHIQVATYQIYRPFHGDIRLQAIHQRVVGVHNAVFNPRGAGNGVKIEPVAYTEKRGRRRKRAKAREQTQSDAKGKRPRTKKKRWQERGGEKRRETTTADQSANEHSQERKLTRDKSK

SEQ ID NO: 60537 - protein, 96 aa, Homo sapiens
MTLRGMYFYMADAATFTDCATGKRFMVANNAELERSYLAARGHSEKPVLLSVEGHFTLEGNPDTGRIRRLRRIRQWCSTPDATLARLIMPTTPLIP

SEQ ID NO: 60538 - protein, 80 aa, Homo sapiens
RPPEHLHGAANVHQRLLWCSDPDRIDRSIYGYAADLRYKPENLYADIRSPLLPVCRTAQRGAIQSVLSSRRSLYHARIRK

SEQ ID NO: 60539 - protein, 784 aa, Homo sapiens
  DOMAIN (133)..(185): ELEMENT TRANSPOSABLE INSERTION PROTEIN TRANSPOSITION DNA domain identified by eMATRIX, accession number PD02455C, p-value= 5.253e-11, raw score of 29.23
  DOMAIN (71)..(211): Integrase core domain identified by PFam, accession name rve, E-value=5.3e-20, PFam score of 73.2
MKAGQRLTLKRPQHGMRSYLAVAGGIDVPPRSPDRLVHPLLLTEKLLYRPSKRAHTGRVALKESNQRCPPDGFKFSCDNGERLRVTFALDCCDREPLHWAVTTGGFNSETVQDVMLGAVERRFGNDLPSSPVEWLTDNGSCYRANETRQFARMLGLEPKNTAVRSPESNGIAESFVKTIKRDYISIMPKPDGLTAAKNLAEAFEHYNECIRIVFDLFVNLDATDEQLDFPIVYASALNGIAGLDHEDMAEDMTPLYQAIVDHVPAPDVDLDGPFQMQISQLDYNSYVGVIGIGRIKRGKVKPNQQVTIIDSEGKTRNAKVGKVLGHLGLERIETDLAEAGDIVAITGLGELNISDTVCDTQNVEALPALSVDEPTVSMFFCVNTSPFCGKEGWHCLEAYCAMSIFSAVALTLMSSMQGQRNAIERMRNETLALWIADTQLQSQDSFELENTSSSGKELINGEEWNWRSDIHSSKDGTLLERTITVTLPSGQTTCLRVIKASIINPGRHKMINRQQGFTLLEVMAALAIFSMLSVLAFMIFSQASELHQRSQKEIQQFNQLQRTITILDNDLLQLVARRRRSTDKIMVLGEEAIFTTQRTCREFKCNDSAASHLSGDILRPLPDWRECQLSEGQETSVRRSTRQNRQLAGGKNSAIPLASSHCTANARFRITQVQNEGQRYALSQAKSIADELMTGCTNFAFSGKPGTGKNHLAAAIGNRLLKDGQTVIVVTVADVMSALHASYDDGQSGEKFLRELCEVDLLALDDIDISSKPLPAQQKKHARH

SEQ ID NO: 60540 - protein, 39 aa, Homo sapiens
  misc_feature (1)...(39): Xaa = X or * as defined in Table 2
SPDSVDAQRGDADKPELXGHENIARRADYGSHDHERRAM

SEQ ID NO: 60541 - protein, 140 aa, Homo sapiens
  DOMAIN (2)..(77): ParB-like nuclease domain identified by PFam, accession name ParBc, E-value=4.2e-11, PFam score of 50.3
SPYAHNARTHSTEQVAQLVESIKQFGWINPVLIDEKGEIIAGHGRVMAAEMLIMDSVPVIVVCGPSPAVHGHAIHNPLAEQCFHGLIVQVCQHPHAAHRRCPAINNLVQYHLLVFRLALNANFIKNQQIHFAQFPQKFFA

SEQ ID NO: 60542 - protein, 148 aa, Homo sapiens; identical to SEQ ID NO: 48615

SEQ ID NO: 60543 - protein, 227 aa, Homo sapiens
  misc_feature (1)...(227): Xaa = X or * as defined in Table 2
MEGRRRQLQLIGKMLRQRDVEPIRQALDKLKNRHNQQVVLFHKLENLRDRLIDQGDDAIAEVLNLWPDADRQQLRTLIRNAKKEKEGNKPPKSARQIFQYLRELAENEGPDKTHQASHQALCSNAGCGVNALSGLRILYLAKAELLRGFRLLRQPIQQFLMDPTKTAVAHHQNMVARLSGFHHHICQRIHIVTPVCRLNAGFCPFCHLPRNMRRFAQEDFIGRPNGX

SEQ ID NO: 60544 - protein, 17 aa, Homo sapiens
  misc_feature (1)...(17): Xaa = X or * as defined in Table 2
SPPASWRXXIPPAGFFT

SEQ ID NO: 60545 - protein, 420 aa, Homo sapiens
  DOMAIN (188)..(204): CBXX/CFQX SUPERFAMILY SIGNATURE domain identified by eMATRIX, accession number PR00819B, p-value=6.400e-10, raw score of 10.83
  DOMAIN (137)..(282): IstB-like ATP binding protein domain identified by PFam, accession name IstB, E-value=0.0013, PFam score of -49.9
VSWQARRPPMSVRQLWWAKWTPPPQAVFTVWLIKNKIFPFMWSFGVSGLNFARHCENQVERSRALNGRYRELEKFRQQGFSPEQVIRHSIANEYQGLFAPKGVRPETLLRQTVAEWREWQLSEGQKRCEEINRQNRQLRVEKILNRSGIQPLHRKCSFSNYQVQNEGQRYALSQAKSIADELMTGCTNFAFSGKPGTGKNHLAAAIGNRLLKDAMTMGSQAKIFAGTVRVDLLVLDEIGIQRETKNEQVVLHQIVDRRTASMRQPRVGSASYGTWARTADKLVLTDSKGEKSYYRAKGDALEMLDREGNPIESQFNYTLEAAQSSLPMTPMTLRGMYFYMADAATFTDCATGKRFMVANNAELERSYLAARGHSEKPVLLSVEGHFTLEGNPDTGAPTKVLAPDTAGKFYPNQDCSSLGQ

SEQ ID NO: 60546 - protein, 393 aa, Homo sapiens
MGAGPPAPPVPIRVTCAQCGPAALAQLSLGFWAVDDISPGKESLGPDSSSGGQEDPASQQWAGDHAQAGPSARRNKHLDWLDACLVTFLAMSVPHLPEKWATSCFQEDFISKHSAGAVPRPPALPDVPQQHREKAWKQGKRKAFCMAQHLLRKENKKTASDPSRAGQREGGHHLGEWMWVSKTNTGYVAWSWEVVGARKEVESMIDSFICFLKKVDDGAAAQPQGMEFTASSPSTFTGGAYNTIVKLFPDWPRQDLDSVWDLLLLSKQQRIKFPDILHVHRGALTKVTGSRRLVGGGMMEPSSCCCSHNKCHHQGPSSCQCRLSRAGDWGTCSHHLSNSGGSQASQGSDDDRNEKWDDSSTLVDELRTPGRGMYLVFDGSVDLHYHCSAKCKS

SEQ ID NO: 60547 - protein, 405 aa, Homo sapiens
  DOMAIN (126)..(164): Short-chain dehydrogenases/reductases family proteins domain identified by eMATRIX, accession number BL00061B, p-value=5.320e- 15, raw score of 25.79
  DOMAIN (7)..(182): short chain dehydrogenase domain identified by PFam, accession name adh_short, E-value=2.2e-61, PFam score of 217.4
MGAFTGKTVLILGGSRGIGAAIVRRFVTDGANVRFTYAGSKDAAKRLAQETGATAVFTDSADRDAVIDVVRKSGALDILVVNAGIGVFGEALELNADDIDRLFKINIHAPYHASVEAARQMPEGGRILIIGSVNGDRMPVAGMAAYAASKSALQGMARGLARDFGPRGITINVVQPGPIDTDANPANGPMRDMLHSLMAIKRHGQPEESLLYHAGILPRQKAIILGSFSGSTPNDYDAGYNLESVYAFLRSRLSIPLITGLDFGHEQRTVTLPTNLSALRNNASKGQTDIKGLSDSTFVTPKVDIDTSDKLYADAWLGFKGTDWKNEINVRDFIQHNYTPYEGDESFLAEATPATTELWEKVMEGIRIENATHAPVDFDTNIGTKIAESERSGLETKNSPYALLA

SEQ ID NO: 60548 - protein, 125 aa, Homo sapiens
LPVARVRDLHARLFPEHVNPKKDRKYLIIPTLYSLRVPGHPGSGWFGWRPRTSHQSRHRHCGYPSSSLPAASFPLRYQHSDRCEPRRLTRHCQDAPQPGRSHLPSDSAANVRAGKHSGADVPGKP

SEQ ID NO: 60549 - protein, 139 aa, Homo sapiens
TALKPGSTLFFPIVPISGSGNFGVTAFVNKGRQFRIIFRRFLRQRMTRSYRQVGTTHKGVRAGSVNGQRVVIVVNVEGDLHAFGTTDPVTLHGFNGVWPVIQFIQIVEQLVSVSSDFDKPLRDLCYVQLWYRSASSSRR

SEQ ID NO: 60550 - protein, 217 aa, Homo sapiens
  DOMAIN (126)..(142): Purine/pyrimidine phosphoribosyl transferases proteins domain identified by eMATRIX, accession number BL00103B, p-value=1.947e- 14, raw score of 9.64
  DOMAIN (34)..(188): Phosphoribosyl transferase domain identified by PFam, accession name Pribosyltran, E-value=3.3e-43, PFam score of 157.0
PFHGQYRRQSDHNPLPETGGGFFFENNLFLCMTINPVDPSPLEDPKAYALSIDLLVERYKNAGITKVVGTEARGFLFGAPVALGLGVGFVPVRKPGKLPRETISETYDLEYGTDQLEIHVDAIKPGDKVLVVDDLLATGGTIEATVKLIRRLGGEVADAAFIINLFELGGEQRLEKQGITSYSLCPFPGPLIIRQSWAAHATDRHKMCFHPLPFGRG

SEQ ID NO: 60551 - protein, 181 aa, Homo sapiens
LRMGDLSRTALWLGGRRDPSGSFRVRDGAAAEVGRACLGLPSECGSLVRARASPRPLLGPAVCPWRARSPRPGLPRPSPTCPWKRGGDWCALSLVAPAASRHPPLSASEQRIPPTSTCTCTRPLGNPLAFLSRALRSNKNWSGRRNARHRCLFCKPLAALSKLCPARLVTLRCERSRSCSG

SEQ ID NO: 60552 - protein, 88 aa, Homo sapiens
  misc_feature (1)...(88): Xaa = X or * as defined in Table 2
RVRRMMYTVTLYSFSTNKNTYIXEXEXGXGWRHHIFLGXMKCFSSRVILVLTSHDSSQSSLQTVSLLLLSSFALDPSSTMLTTEESVE

SEQ ID NO: 60553 - protein, 50 aa, Homo sapiens
  misc_feature (1)...(50): Xaa = X or * as defined in Table 2
RVRRMMYTVTLYSFSANKNTYIXEXEXGLGWRHHIFRGYMRQHFNDXSWP

SEQ ID NO: 60554 - protein, 45 aa, Homo sapiens
  misc_feature (1)...(45): Xaa = X or * as defined in Table 2
RVRRMMYTVTLSSFSANKNTYIXEXEXGLGWRHHIFLGXIQHFNR

SEQ ID NO: 60555 - protein, 21 aa, Homo sapiens
RVSSPLYSIFMTTGPADQQQP

SEQ ID NO: 60556 - protein, 890 aa, Homo sapiens
GQLTPLLEHSKEKGHIVSESPTFKFSKSQSTSDSLTQEVATFPDQEKYSELNQENGTTSIPTSCVPVATPLVLPSNIQSARPSAKNSIHIKEIDAVQCSDKLDELKDGKEEEIKYFNCNKEELPLFSDSFQDAYIPHNPDSKDEKQKLAETSSLSNVTSNYDFVGQHKKMKYNIHERNGVRFLKSILKKESKYEHGYLKALIINQSFKFGNQKAAAIRDSIELTKEKGAEIPKTIKKLRWFDETSNIENNAENSHSLKNKTGTTQQHSQQFHIQSGAGSNIISVSTCAVNSADTKKSREDSISENVTTLGGSGADHMPLNCFIPSGYNFAKHAWPASKKEESKIPVHDDSKTKQGKPQRGRAKIIRKPGSAKVQSGFICTNRKGAVIQPQSASKVNIFTQAQGKLIIPCPPPQSTSNIRSGKNIQVSQCQPVTPENPQNIITHNSFNSKHVLPTEHSLNQWNQESSSPLSNACSDLVTVIPSLPSYCSSECQTFAKINHSNGTQAVARQDATLYCTQRSPVCEESYPSVTLRTAEEESVPLWKRGPNVLHQNKRATGSTVMRRKRIAETKRRNILEQKRQNPGSVGQKYSEQINICGDQASADYKAAEKFIEEFAKVIADEYLTPEEVYVTDEHHCMPATVNRDVDVEGFQNEFSMKDAIHAVANTWNTGTKDTIVHSWHNLWPATMFSDDEQDSTSEFLMAENLVKASVPEDEILTVLNSKQIQKSNLPLNKTQQFNICTLSAEEQKILESLNDLSERLHFNIVEDGSNAKDESKSNDTVCKEDCEESCDVKTKITREEKHFMCSDAFRGLKKEDNQNAMPFSTSDVDNDGCRPACLVNVNNPDNHEGTHSGLPRVVWNIVGIQHLGASICPLSPSNFFVVGDNWVTLP

SEQ ID NO: 60557 - protein, 69 aa, Homo sapiens
PDRTPRRRHPDSQDAHRRAGPAPGSVHRHRPASRQSSWLRSARGAHAGHTHLHRWQWPSRGTHSHPPSR

SEQ ID NO: 60558 - protein, 125 aa, Homo sapiens
  misc_feature (1)...(125): Xaa = X or * as defined in Table 2
ESEVLGPRSLPTWVPSPSGSLGPRGGRGGCILRPSRGGRGRHGPTKAGPWSPESRGRXDWKARGPPAPSRGSPSRARARRGGSGGGPADEPGLQGRTRRPALSSRTSAPDPGRVVERSGRFRSES

SEQ ID NO: 60559 - protein, 113 aa, Homo sapiens
RNSCVDPRIRDGVRSIRDPPGDVLASPEPLFTADCPIFYPPGPLGGFDSMAELLPSSRAELEDPGGDGAIPAMYLDCISDLRQKEITDGIHSSSDINILYNDAVESCIQVIRL

SEQ ID NO: 60560 - protein, 1111 aa, Homo sapiens
  DOMAIN (277)..(316): PROTEIN ZINC FINGER ZINC-FINGER METAL-BINDING NU domain identified by eMATRIX, accession number PD01066, p-value=6.400e-25, raw score of 19.43
  DOMAIN (275)..(337): KRAB box domain identified by PFam, accession name KRAB, E- value=7.9e-25, PFam score of 95.9
GRGPEPWLGSVQGQRSLLEHHPGKKQMGYMGEMEVQGPTRESGQSLPPQKKAYLSHLSTGSGHIEGDWAGRNRKLLKPRSIQKSWFVQFPWLIMNEEQTALFCSACREYPSIRDKRSRLIEGYTGPFKVETLKYHAKSKAHMFCVNALAARDPIWAARFRSIRDPPGDVLASPEPLFTADCPIFYPPGPLGGFDSMAELLPSSRAELEDPGGDGAIPAMYLDCISDLRQKEITDGIHSSSDINILYNDAVESCIQDPSAEGLSEEVPVVFEELPVVFEDVAVYFTREEWGMLDKRQKELYRDVMRMNYELLASLGPAAAKPDLISKLERRAAPWIKDPNGPKWGKGRPPGNKKMVAVREADTQASAADSALLPGSPVEARASCCSSSICEEGDGPRRIKRTYRPRSIQRSWFGQFPWLVIDPKETKLFCSACIERPNLHDKSSRLVRGYTGPFKVETLKYHEVSKAHRLCVNTVEIKEDTPHTALVPEISSDLMANMEHFFNAAYSIAYHSRPLNDFEKILQLLQSTGTVILGKYRNRTACTQFIKYISETLKREILEDVRNSPCVSVLLDSSTDASEQACVGIYIRYFKQMEVKESYITLAPLYSETADGYFETIVSALDELDIPFRKPGWVVGLGTDGSAMLSCRGGLVEKFQEVIPQLLPVHCVAHRLHLAVVDACGSIDLVKKCDRHIRTVFKFYQSSNKRLNELQEGAAPLEQEIIRLKDLNAVRWVASRRRTLHALLVSWPALARHLQRVAEAGGQIGHRAKGMLKLMRGFHFVKFCHFLLDFLSIYRPLSEVCQKEIVLITEVNATLGRAYVALESLRHQAGPKEEEFNASFKDGRLHGICLDKLEVAEQRFQADRERTVLTGIEYLQQRFDADRPPQLKNMEVFDTMAWPSGIELASFGNDDILNLARYFECSLPTGYSEEALLEEWLGLKTIAQHLPFSMLCKNALAQHCRFPLLSKLMAVVVCVPISTSCCERGFKAMNRIRTDERTKLSNEVLNMLMMTAVNGVAVTEYDPQPAIQHWYLTSSGRRFSHVYTCAQVPARSPASARLRKEEMGALYVEEPRTQKPPILPSREAAEVLKDCIMEPPERLLYPHTSQEAPGMS

SEQ ID NO: 60561 - protein, 132 aa, Homo sapiens
ARLLAEPQLPRGHLLPRFSRGHSAREDHPTQLSGRPWIQPRFLPSQAEHPHVPILPSQPQQPPTTPPDLSYPPTQTLAGPRPGLTSSRKGSLTNPVHSASILSTDVSPSEVLPACQRPRDCALSLPGLGVGW

SEQ ID NO: 60562 - protein, 4561 aa, Homo sapiens
  DOMAIN (3751)..(3790): PROTEIN ZINC FINGER ZINC-FINGER METAL-BINDING NU domain identified by eMATRIX, accession number PD01066, p-value=6.400e-25, raw score of 19.43
  DOMAIN (252)..(1475): Low-density lipoprotein receptor domain identified by PFam, accession name ldl_recept_a, E-value=1.1e-86, PFam score of 301.4
MLPPGTRVLVQLSPQFRGRVAGLCGDFDGDASNDLRSRQGVLEPTAELAAHSWRLSPLCPEPGDLPHPCTMNTHRAGWARARCGALLQPLFTLCHAEVPPQQHYEWCLYDACGCDSGGDCECLCSAIATYADECARHGHHVRWRSQELCSLQCEGGQVYEACGPTCPPTCHEQHPEPGWHCQVVACVEGCFCPEGTLLHGGACLEPASCPCEWGRNSFPPGSVLQKDCGNCTCQEGQWHCGGDGGHCEELVPACAEGEALCQENGHCVPHGWLCDNQDDCGDGSDEEGCAAPGCGEGQMTCSSGHCLPLALLCDRQDDCGDGTDEPSYPCPQGLLACADGRCLPPALLCDGHPDCLDAADEESCLGQVTCVPGEVSCVDGTCLGAIQLCDGVWDCPDGADEGPGHCPLPSLPTPPASTLPGPSPGSLDTASSPLASASPAPPCGPFEFRCGSGECTPRGWRCDQEEDCADGSDERGCGGPCAPHHAPCARGPHCVSPEQLCDGVRQCPDGSDEGPDACVEAPAPPAMRGPPGQAGGPTSSRAPSPPSPPEAQGEGRKGQERSRTHLTVPAGSTQLPLCPGLFPCGVAPGLCLTPEQLCDGIPDCPQGEDELDCGGLPALGGPNRTGLPCPEYTCPNGTCIGFQLVCDGQPDCGRPGQVGPSPEEQGCGAWGPWSPWGPCSRTCGPWGQGRSRRCSPLGLLVLQNCPGPEHQSQACFTAACPVDGEWSTWSPWSVCSEPCRGTMTRQRQCHSPQNGGRTCAALPGGLHSTRQTKPCPQDGCPNATCSGELMFQPCAPCPLTCDDISGQVTCPPDWPCGSPGCWCPEGQVLGSEGWCVWPRQCPCLVDGARYWPGQRIKADCQLCICQDGRPRRCRLNPDCAVDCGWSSWSPWAKCLGPCGSQSIQWSFRSSNNPRPSGRGRQCRGIHRKARRCQTEPCEGCEHQGQVHRVGERWHGGPCRVCQCLHNLTAHCSPYCPLGSCPQGWVLVEGTGESCCHCALPGENQTVQPMATPAAAPAPSPQIRFPLATYILPPSGDPCYSPLGLAGLAEGSLHASSQQLEHPTQAALLGAPTQGPSPQGWHAGGDAYAKWHTRPHYLQLDLLQPRNLTGILVPETGSSNAYASSFSLQFSSNGLHWHDYRDLLPGILPLPKVSPAQGRWGQQPTMPFCGFHSLCPQGPSSVPEGHGLHSMLVEYLLFPRNWDDLDPAVWTFGRMVQARFVRVWPHDVHHSDVPLQVELLGCEPGVGLRCASGECVLRGGPCDGVLDCEDGSDEEGCVLLPEGTGRFHSTAKTLALSSAQPGQLLHWPREGLAETEHWPPGQESPTSPTETRPVSPGPASGVPHHGESVQMVTTTPIPQMEARTLPPGMAAVTVVPPHPVTPATPAGQSVAPGPFPPVQCGPGQTPCEVLGCVEQAQVCDGREDCLDGSDERHCASRALCSPSQLSCGSGECLSAERRCDLRPDCQDGSDEDGCVDCVLAPWSVWSSCSRSCGLGLTFQRQELLRPPLPGGSCPRDRFRSQSCFVQACPDCELGRVYVSADLCQKGLVPPCPPSCLDPKANRSCSGHCVEGCRCPPGLLLHDTRCLPLSECPCLVGEELKWPGVSFLLGNCSQCVCEKGELLCQPGGCPLPCGWSAWSSWAPCDRSCGSGRCSAGRPGLPGPPAPKAALPREGALAGAVVPDSAPALGIHPAQEMPPRRSPAAPLYAQIECTGFCAPGCTCPPGLFLHNASCLPRSQCPCQLHGQLYASGAMARLDSCNNCCNVGIRRRFRAGTAPPAAFGGAECQGPTMEAEFCSLRPCPASWGCCHRVPCTGELEQRPLMVSQILEAQDQGVAPVSPGSSPTAAPGLVRRVSPRGHPGPLGASVQPPVALPGAIGTGSVPGAGGWGPWGPWSHCSRSCGGGLRSRTRACDQPPPQGLGDYCEGPRAQGEVCQALPCPVTNCTAIEGAEYSPCGPPCPRSCDDLVHCVWRCQPGCYCPPGQVLSSNGAICVQPGHCSCLDLLTGQRHHPGARLARPDGCNHCTCLEGRLNCTDLPCPDCGGGQSLHPCGQPCPRSCQDLSPGSVCQPGSVGCQPTCGCPLGQLSQDGLCVPPAHCRCQYQPGAMGIPENQSRSAGSRFSSWESLEPGEVVTGPCDNCTCVAGILQCQEVPDCPDPGVWSSWGPWEDCSVSCGGGEQLRSRRCARPPCPGPARQSRTCSTQVCREAGCPAGRLYRECQPGEGCPFSCAHVTQQVGCFSEGCEEGCHCPEGTFQHRLACVQECPCVLTAWLLQELGATIGDPGQPLGPGDELDSGQTLRTSCGNCSCAHGKLSCSLDDCFEADGGFGPWSPWGPCSRSCGGLGTRTRSRQCVLTMPTLSELPVCPGPGCGAGNCSWTSWAPWEPCSRSCGVGQQRRLRAYRPPGPGGHWCPNILTAYQERRFCNLRACPEAGCPAGMEVVTCANRCPRRCSDLQEGIVCQDDQVCQKGCRCPKGSLEQDGGCVPIGHCDCTDAQGHSWAPGSQHQDACNNCSCQAGQLSCTAQPCPPPTHCAWSHWSAWSPCSHSCGPRGQQSRFRSSTSGSWAPECREEQSQSQPCPQPSCPPLCLQGTRSRTLGDSWLQGECQRCCGPGLASRSGSCPCLMAKADPTCNSTFLHLDTQGCYSGPCPEECVWSSWSSWTRCSCRVLVQQRYRHQGPASRGARAGAPCTRLDGHFRPCLISNCSEDSCTPPFEFHACGSPCAGLCATHLSHQLCQDLPPCQPGCYCPKGLLEQAGGCIPPEECNCWHTSAAGAGMTLAPGDRLQLGCKECECRRGELHCTSQGCQGSLGPGVVTGKGTHTLSFQSSTATGSVWILRQGGPGLEPLTSAPHPSASSASALTLEPALTHASGVCGGHGAPARCPAVGGSGYAGERQRPSVEEAAGSHGLKTESCNGGPCPGCRCPPGQLVQDGRCVPISSCRCGLPSANASWELAPAQAVQLDCQNCTCVNESLVCPHQECPVLGPWSAWSSCSAPCGGGTMERHRTCEGGPGVAPCQAQDTEQRQECNLQPCPECPPGQVLSACATSCPCLCWHLQPGAICVQEPCQPGCGCPGGQHSLPWGLTLTLEEQAQELPPGTVLTRNCTRCVCHGGAFSCSLVDCQECPLGNTWQQVAPGELGLCEQTCLEMNATKTQSNCSSARASGCVCQPGHFRSQAGPCVPEDHCECWHLGRPHLGEEMVLEPGSCCPSCRREAPEEQSPSCQLLTELRNFTKGTCYLDQVEVSYCSGYCPSSTHVMPEEPYLQSQCDCCSYRLDPESPVRILNLRCLGGHTEPVVLPVIHSCQCSSCQGPAFREPIAASRAAHLERTTLPVTPRRLGLGSDRKAVRSVRRKSQLSALILGPPALPPPDVRERSSWAALPPYLGALPLREPGSPGRSRRLHPQARPRGEGAARASESGAMEPRESGKAPVTFDDITVYLLQEEWVLLSQQQKELCGSNKLVAPLGPTVANPELFRKFGRGPEPWLGSVQGQRSLLEHHPGKKQMGYMGEMEVQGPTRESGQSLPPQKKAYLSHLSTGSGHIEGDWAGRNRKLLKPRSIQKSWFVQFPWLIMNEEQTALFCSACREYPSIRDKRSRLIEGYTGPFKVETLKYHAKSKAHMFCVNALAARDPIWAARFRSIRDPPGDVLASPEPLFTADCPIFYPPGPLGGFDSMAELLPSSRAELEDPGGDGAIPAMYLDCISDLRQKEITDGIHSSSDINILYNDAVESCIQDPSAEGLSEEVPVVFEELPVVFEDVAVYFTREEWGMLDKRQKELYRDVMRMNYELLASLGPAAAKPDLISKLERRAAPWIKDPNGPKWGKGRPPGSPVEARASCCSSSICEEGDGPRRIKRTYRPRSIQRSWFGQFPWLVIDPKETKLFCSACIERPNLHDKSSRLVRGYTGPFKVETLKYHEVSKAHRLCVNTVEIKEDTPHTALVPEISSDLMANMEHFFNAAYSIAYHSRPLNDFEKILQLLQSTGTVILGKYRNRTACTQFIKYISETLKREILEDVRNSPCVSVLLDSSTDASEQACVGIYIRYFKQMEVKESYITLAPLYSETADGYFETIVSALDELDIPFRKPGWVVGLGTDGSAMLSCRGGLVEKFQEVIPQLLPVHCVAHRLHLAVVDACGSIDLVKKCDRHIRTVFKFYQSSNKRLNELQEGAAPLEQEIIRLKDLNAVRWVASRRRTLHALLVSWPALARHLQRVAEAGGQIGHRAKGMLKLMRGFHFVKFCHFLLDFLSIYRPLSEVCQKEIVLITEVNATLGRAYVALESLRHQAGPKEEEFNASFKDGRLHGICLDKLEVAEQRFQADRERTVLTGIEYLQQRFDADRPPQLKNMEVFDTMAWPSGIELASFGNDDILNLARYFECSLPTGYSEEALLEEWLGLKTIAQHLPFSMLCKNALAQHCRFPLLSKLMAVVVCVPISTSCCERGFKAMNRIRTDERTKLSNEVLNMLMMTAVNGVAVTEYDPQPAIQHWYLTSSGRRFSHVYTCAQVPARSPASARLRKEEMGALYVEEPRTQKPPILPSREAAEVLKDCIMEPPERLLYPHTSQEAPGMS

SEQ ID NO: 60563 - protein, 61 aa, Homo sapiens
  misc_feature (1)...(61): Xaa = X or * as defined in Table 2
CLSTVFFLCITLVSECWSLFXSHMHVLLPRNRKEKLIEIFRTQTYDVNAYKASAHRNSGPG

SEQ ID NO: 60564 - protein, 82 aa, Homo sapiens
  misc_feature (1)...(82): Xaa = X or * as defined in Table 2
MLFSKELQWHIQKVSKWAFRLPFFPPCGPREGRGRGCSVTGPGGQVLLTAPPQARCAWLGLRDGFGTATPGLLXLRLVPVNA

SEQ ID NO: 60565 - protein, 440 aa, Homo sapiens
  DOMAIN (169)..(203): kw TRANSCRIPTASE REVERSE II ORF2 domain identified by eMATRIX, accession number DM01354P, p-value=1.000e-20, raw score of 9.18
SRCDKDLDTLSGYAMCLPNLTRLQTYRFAEHRPILCVEIKVTCRGADGVGKGERVEERRATAIPYCAQQDTLLFVFPGQSLYRQAFGQAHTNHKKVAADGESREESLIQESASKEQYYVRKVLELQTELKQLRNVLTNTQSENERLASVAQELKEKIETEGKLPNTFYEASIVLLPKPDKDINRKEKDKPVFLMNKDAKVLNKILANQIQKCVKRIMLYDQGEFIPGLGHGEHKMILEQFASDIKEVITIITNYDVLKTWSQLGGAPTGQICYHLSIKASIPMKCTMSTPYSTEAKAEAQRRQEVCWGLATKRSQHPDTLATRGLPVTTGRRKAAGSFRQLHIRRRGRKLLFRLPRPRSGNESLYQYLRWPPAHPPSRSVGWFPARRAAPSSRPRVLAREAPGLRLGMEEGKMDENEWGYHGEGNKSLVVAHAQNLKAFT

SEQ ID NO: 60566 - protein, 1151 aa, Homo sapiens
TYGWETQQLRRSQVHIQGNDPPHRCLPMHGLNSQSPSLKTGPRHRTVSMRGSNGAEAGARERPTSPGFGPQQRGGTPEPSGSSSMTHASDGEQRRALNAGSLRDSIAVPSLSPKLRPGEAKINGMHATAVPSQAEGRHQQSIMGNRLVSSLQPEGAVLGPVATSQINQNVEIQRGRLRDDIKEYKFREARLLQDYSELEEENISLQKQVSVLRQNQLLPRRGNTDQHVPALTLLTMALALTAALPQNPVCRKNKSLTKLLGVVSAEQLVVRNRAFSFPRMLAFQFDITDQALRDSQVLDEEKYPDAVYLSEGPSSCSMGIRSASRPGFQKAHNDMFYCFFRFELVIVWRIQIDEDGKVFPKLDLLTKVPQRASREECGVLVRSMPAENKRPKAATLKFLTRFNVFFIALELDKNRAIETAPLSFRTLNRDLISRPFSIVKICERVLSQTSQGRHDYAAAAVSKTGQKRIHSSGTRGSGAPHSPGCHWQDGHRHQQACLTGELTQGVHAQEGVWVLCSTAGLELRSRPKVSLSTTISTQTNNEKGKQKDMPYQFLMYLLNTPVQFAEFVMSSLREKKRHYKLNGNVQQVQQYRVAMTAKDCSIMIALSPCLQDARTFSVAIKEYLKLEESLPYVTLASPSNRHRQQPPHERSNSSKLKTTPGSVYLTVAPSHYRLPDHKGSGQDRTLGCPRRVMCRMHSKALKAGERGGRPRYNFHVDKTLMLLFPPTFELFQVEFEGLKHEIKRLEEETEYLNSQLEDAIRLKEISERQLEEALETLKTEREQKNSRNGELIYGCKDARSPVADWSELAHHLKPFFFPSNGLASGPHCTRAVIRELVHVITRVLLSGSDKGRAGTLSPGLGPQGPRVCEASPFSRSLRCQVPVQGAVLACGDARMAEPRMSPAVCAGLCLPPRSLIINMLSFSPDVLGKNTPERSGLPKGCLLYKTLQVQMLDLLDIEGLYPLYNRVERYLEEFPEERKTLQIDGPYDEAFYQKLLDLSTEDDGTVAFALTKDSEDGTEWVTVGCISREQVFASRLIYAPERKPQRHKDVGIMDECGLGVTNGCTWVWGSGKTVDMDSYQYLDSSHTKSWGPGTVVGARYLIHITDVPCLISYKSCAAQKALSHPMFAYCRKNITVLLLVLTANDHADLLT

SEQ ID NO: 60567 - protein, 870 aa, Homo sapiens
CRIRDFPGRRFRSATMSAPSEEEEYARLVMEAQPEWLRAEVKRLSHELAETTREKIQAAEYGLAVLEEKHQLKLQFEELEVDYEAIRSEMEQLKEAFGQAHTNHKKVAADGESREESLIQESASKEQYYVRKVLELQTELKQLRNVLTNTQSENERLASVAQELKEINQNVEIQRGRLRDDIKEYKFREARLLQDYSELEEENISLQKQVSVLRQNQVEFEGLKHEIKRLEEETEYLNSQLEDAIRLKEISERQLEEALETLKTEREQKNSLRKELSHYMSINDSFYTSHLHVSLDGLKFSDDAAEPNNDAEALVNGFEHGGLAKLPLDNKTSTPKKEGLAPPSPSLVSDLLSELNISEIQKLKQQLMQMEREKAGLLATLQDTQKQLEHTRGSLSEQQEKVTRLTENLSALRRLQASKERQTALDNEKDRDSHEDGDYYEVDINGPEILACKYHVAVAEAGELREQLKALRSTHEAREAQHAEEKGRYEAEGQALTEKVSLLEKASRQDRELLARLEKELKKVSDVAGETQGSLSVAQDELVTFSEELANLYHHVCMCNNETPNRVMLDYYREGQGGAGRTSPGGRTSPEARGRRSPILLPKGLLAPEAGRADGGTGDSSPSPGSSLPSPLSDPRREPMNIYNLIAIIRDQIKHLQAAVDRTTELSRQRIASQELGPAVDKDKEALMEEILKLKSLLSTKREQITTLRTVLKANKQTAEVALANLKSKYENEKAMVTETMMKLRNELKALKEDAATFSSLRAMFATRCDEYITQLDEMQRQLAAAEDEKKTLNSLLRMAIQQKLALTQRLELLELDHEQTRRGRAKAAPKTKPATPSVSHTCACASDRAEGTGLANQVFCSEKHSIYCD

SEQ ID NO: 60568 - protein, 77 aa, Homo sapiens
SASSIVRDLLALRGRMEAAQISQTLNTPQPMINAMLQQLESMGKAVRIQEEPDGCLSGSCKSCPEGKACLREWWALR

SEQ ID NO: 60569 - protein, 317 aa, Homo sapiens
LIRFITGQGAMSSNTFTLGTKSVNRLGYGAMQLAGPGVFGPPRDRHVAITVLREALALGVNHIDTSDFYGPHVTNQIIREALYPYSDDLTIVTKIGARRGEDASWLPAFSPAELQKAVHDNLRNLGLDVLDVVNLRVMMGDGHGPAEGSIEASLTVLAEMQQQGLVKHIGLSNVTPTQVAEARKIAEIVFVQNDHNFALRDALHALKLRVRQGEGKDLNNESTPMAFENIKQVIDDMATDATMFDVNKKCLLLFNVLADDGYWRTSAATGKIARTPQNAFVVIPECNIWSISSQSPTRYAFEAVYQTGYRQFGRIVN

SEQ ID NO: 60570 - protein, 1583 aa, Homo sapiens; identical to SEQ ID NO: 39592
  DOMAIN (1135)..(1172): FGGY family of carbohydrate kinases proteins domain identified by eMATRIX, accession number BL00933D, p-value=2.565e- 18, raw score of 24.01
  DOMAIN (1066)..(1273): FGGY family of carbohydrate kinases domain identified by PFam, accession name FGGY, E-value=1.1e-94, PFam score of 328.0

SEQ ID NO: 60571 - protein, 459 aa, Homo sapiens
  DOMAIN (231)..(251): BACTERIAL PERIPLASMIC SPERMIDINE/PUTRESCINE-BINDING PROTEIN SIGNATURE domain identified by eMATRIX, accession number PR00909H, p-value=3.000e-19, raw score of 13.28
RNAMSKKQSSPPHDALFKLFLRQPDTAGDFLAFHLPAPIHALCDMKTLKLESSSFIDDDLRESYSDVLWSVKTEQGPGYIYCLIEHQSTSNKLIAFRMMRYAIAAMQNHLDAGYKSKLPEWKNLDPELLKLVAKHDPDNKFAMPYMWATTGIGYNVDKVKAVLGENAPVDSWDLILKPENLEKLKSCGVSFLDAPEEVFATVLNYLGKDPNSTKADDYTGPATDLLLNVRPNIRYFHSSQYINDLANGDICVAIGSDAVHNAATFQHVGQNFHIFMRVSAEALPCFNHVVVNHAQRGEAHKVRIVIVGKRESMPGVQPAMICMTTFICFAAKSDLQACKFRAPCRLYPPPFADNLIGDVRTIKVAGINMIDAQCQRLTQHGYSDVAISWGAKNSRTCQLHRAITKTVNGFCTESKCIAVIAPCPVIKLWQHVRSNAYLPRPDGRPVGFRRTIRKTGERL

SEQ ID NO: 60572 - protein, 141 aa, Homo sapiens
  misc_feature (1)...(141): Xaa = X or * as defined in Table 2
MDQIISLFGRPDHVAYDIRSLRNKANPDDTFEAQLFYGDLKAIVKTSHLVKIDYPKFIVHGKKGSFIKYGIDQQETSLKANIMPGEPGFAADDSVGVLEYVNDEGVTVREEMKPEMGDYGPRLXCVVSNHHPRCAKLRQGI

SEQ ID NO: 60573 - protein, 623 aa, Homo sapiens
  DOMAIN (125)..(175): Chaperonins TCP-1 proteins domain identified by eMATRIX, accession number BL00750B, p-value=1.000e-40, raw score of 16.17
  DOMAIN (90)..(622): TCP-1/cpn60 chaperonin family domain identified by PFam, accession name cpn60_TCP1, E-value=1e-148, PFam score of 507.5
  misc_feature (1)...(623): Xaa = X or * as defined in Table 2
PSQPLLWFAGRPRGRDTGCPRCKQNSTCIAAVKMEGPLSVFGDRSTGETIRSQNDKESFNEQKTCRIXRKRLVXLYEVAEHEIVMAAASIANIVKSSLGPVGLDKMLVDDIGDVTITNDGATILKLLEVEHPAAKVLCELADLQDKEVGDGTTSVVIIAAELLKNADELVKQEIHPTSVISGYRLACKEAVRYINENPNLLTQDELGRDCLINAAKTSMSSQIIGINGDFFANMVVDAVLAIKYTDIRGQPRYPVNSVNILKAHGRSQMESMLISGYALNCVVGSQGMPKRIVNAKIACLDFSLQKTKMKLGVQVVITDPEKLDQIRQRESDITKERIQKILATGANVILTTGGIDDMCLKYFVEAGAMAVRRVLKRDLKRIAKASGATILSTLANLEGEETFEAAMLGQAEEVVQERICDDELILIKSTKARTSASIISRVPIDSMCDEMERSLHDALCVVKRVLESKSVVPRGGAVEAALSIYLENYATSMGSREQLAIARVCKITLWLFPNTLSSXCLPRDSTDLVLQNLRAFHNEAQVNPERKNLKWIGLDLSNGTPRDNKQAGVFEPTIVKVRGLNFATEAAITILRIDDLIKLHPESKDDKHGGSYEDAVHSGALND

SEQ ID NO: 60574 - protein, 324 aa, Homo sapiens
  DOMAIN (173)..(207): Rubredoxin proteins domain identified by eMATRIX, accession number BL00202, p-value=7.698e-22, raw score of 19.73
  DOMAIN (168)..(214): Rubredoxin domain identified by PFam, accession name rubredoxin, E-value=2.1e-21, PFam score of 79.8
MGTCIVLRRVRCLVFCTSHWIAETDPRVAVKIFNVARSDKNEILTNVFRSKGVLVGTSTMNNVMMPKIAGLVEEMTGLRFRNKRASAFGSHGWSGGAVDRLSTRLQDAGFEMSLSLKAKWRPDQDALKLCREHGREIARQWALAPLPQSTVNTVVREETSVTTTGDLGPRMQCSVCQWIYDPAKGDPMQDVAPGTPWSEVPDNFLCPECSLGKDFNLHLFPQTWVTDIDAEARVVKSQNNQWQYDKLVLATGASAFVPPVPGRELMLTLNSQQEYRACETQLRDARRVLIVGGGLIGSELAMDFCRAGKAVTLIRQRCQYSGGR

SEQ ID NO: 60575 - protein, 858 aa, Homo sapiens
  DOMAIN (234)..(276): S-adenosylmethionine synthetase proteins domain identified by eMATRIX, accession number BL00376E, p-value=1.000e-40, raw score of 9.08
  DOMAIN (184)..(360): S-adenosylmethionine synthetase domain identified by PFam, accession name S-AdoMet_synt, E-value=1.3e-177, PFam score of 428.6
MWAFRGKRPVTLKILHVPITNLRKNITSTRGLTKESSQGKLVRAQEEYTPAREIAKMGWQSLPARRYCLCWRKIRRYITLRLNIAYAGGYKAPVEDIALWMETDGACDHVDFTWNIPSKCQGPMDIVSRPVFWHAHGIVLFAGARNLNPTLTRIPPYLWLLTLRTGYAAAGMQALALDSRGSPDAVVLSTQHSEEIDQKSLQEAVMEEIIKPILPAEWLTSATKFFINPTGRFVIGGPMGDCGLTGRKIIVDTYGGMARHGGGAFSGKDPSKVDRSAAYAARYVAKNIVAAGLADRCEIQVSYAIGVAEPTSIMVETFGTEKVPSEQLTLLVREFFDLRPYGLIQMLDLLHPIYKETAAYAAEARTEGCSLDVPENIVHSGKTWFVEAKLKQGIESATQKKIVKMIKDSKLKVQAQIQGDEIRVTGKSRDDLQAVMAMVRGGDLVSSKRTFNASYAAMFAGISMRKLLTYGGSFMVLATVSHTAASIAPARNTPDPAQRTGNRHAKKLAGGVKPIAVLCKLLAIFMISEAEVPQLTPKKVERNIADGWRSNNSDQYQANRWHWQYVKKAHQVCRNPGLRDVAPGVPTGSSSQAKWCGRGWTFNGIRCVGHGSTFAYQPIGGGARCSTRSPSQGLDGKPGALDIPGKAVTLIDNAASILASLMPPEVSSRLQHRLTEMGVHLLLKSQLQGLEKTDSGIQATLDRQRNIEVDAVIAATGLRPETALARRAGLTINRGVCVDSYLQTSNTDIYALGDCAEINGQVLPFLQPIQLSAMVLAKNLLGNNTPLKLPAMLVKIKTPELPLHLAGETQRQDLRWQINTERQGMVARGVDDADQLRAFVVSEDRMKEAFGLLKTLPM

SEQ ID NO: 60576 - protein, 1041 aa, Homo sapiens; identical to SEQ ID NO: 48539
  DOMAIN (137)..(187): Sugar transport proteins domain identified by eMATRIX, accession number BL00216B, p-value=8.800e-22, raw score of 27.64
  DOMAIN (41)..(442): Sugar (and other) transporter domain identified by PFam, accession name sugar_tr, E-value=2e-05, PFam score of -39.7

SEQ ID NO: 60577 - protein, 377 aa, Homo sapiens
  DOMAIN (143)..(166): AROMATIC-RING HYDROXYLASE (FLAVOPROTEIN MONOOXYGENASE) SIGNATURE domain identified by eMATRIX, accession number PR00420A, p-value=7.750e-12, raw score of 14.78
  DOMAIN (5)..(274): Pyridine nucleotide-disulphide oxidoreducta domain identified by PFam, accession name pyr_redox, E-value=2.1e-62, PFam score of 213.9
MSNGIVIIGSGFAARQLVKNIRKQDATIPLTLIAADSMDEYNKPDLSHVISQGQRADDLTRQTAGEFAEQFNLHLFPQTWVTDIDAEARVVKSQNNQWQYDKLVLATGASAFVPPVPGRELMLTLNSQQEYRACETQLRDARRVLIVGGGLIGSELAMDFCRAGKAVTLIDNAASILASLMPPEVSSRLQHRLTEMGVHLLLKSQLQGLEKTDSGIQATLDRQRNIEVDAVIAATGLRPETALARRAGLTINRGVCVDSYLQTSNTDIYALGDCAEINGQVLPFLQPIQLSAMVLAKNLLGNNTPLKLPAMLVKIKTPELPLHLAGETQRQDLRWQINTERQGMVARGVDDADQLRAFVVSEDRMKEAFGLLKTLPM

SEQ ID NO: 60578 - protein, 693 aa, Homo sapiens; identical to SEQ ID NO: 56431
  DOMAIN (633)..(658): kw PERIPLASMIC GALACTOSE RIBOSE XYLOSE domain identified by eMATRIX, accession number DM01011C, p-value=1.300e-18, raw score of 17.35
  DOMAIN (178)..(245): Pyridine nucleotide-disulphide oxidor domain identified by PFam, accession name pyr_redox, E-value=7.5e-18, PFam score of 63.1

SEQ ID NO: 60579 - protein, 304 aa, Homo sapiens
  DOMAIN (113)..(139): FAD-DEPENDENT PYRIDINE NUCLEOTIDE REDUCTASE SIGNATURE domain identified by eMATRIX, accession number PR00368C, p-value=9.481e- 11, raw score of 15.74
  DOMAIN (203)..(237): phosphoenolpyruvate-dependent sugar phosph domain identified by PFam, accession name PTS_EIIA_2, E-value=0.046, PFam score of 13.0
MDYYAAIKNDEFMSYGERDAAFGKEAGRVTAATLLMVDDFALLYIALILVATLACVTLAHAYLGEGGTGYPGNREELYLLILLAATGGIVLVSAQCLGQEYRACETQLRDARRVLIVGGGLIGSERGGVVGAITTMGVIVGADMPMFLGSMIAGPLGGWCIKHFDRWVDGFSNKEQAIQFLCGNLGVNGRTEHPFELEEDVWQREEIVTTGVGFGVAIPHTKSQWIRHSSISIARLAKPIGWQSEMGEVELVIMLTLGANEGMNHVKVFSQLARKLVNKNFRQSLFAAQDAQSILTLLETELTF

SEQ ID NO: 60580 - protein, 885 aa, Homo sapiens; identical to SEQ ID NO: 39460
  DOMAIN (586)..(638): GLYCINE DEHYDROGENASE DECARBOXYL domain identified by eMATRIX, accession number PD00545K, p-value=1.000e-40, raw score of 12.74
  DOMAIN (326)..(534): Pyridine nucleotide-disulphide oxidoreducta domain identified by PFam, accession name pyr_redox, E-value=3.6e-54, PFam score of 186.0

SEQ ID NO: 60581 - protein, 803 aa, Homo sapiens
  DOMAIN (607)..(620): 70 KD HEAT SHOCK PROTEIN SIGNATURE domain identified by eMATRIX, accession number PR00301B, p-value=9.419e-13, raw score of 15.36
  DOMAIN (1)..(168): Domain of unknown function DUF36 domain identified by PFam, accession name UPF0117, E-value=6e-102, PFam score of 341.8
MRMDPTRGQSAAEWLQTAEEADIAWVLKTYGEERFAKRIARAIVERNREQPMTRTKELAEVVAAATPVKDKFKHPATRTFQAVRIWVNSELEEIEQALKSSLNVLAPGGRLSIISFHSLEDRIVKRFMRENSRGPQVPAGLPMTEEQLKKLGGRQLRALGKLMPGEEEFSSAYCREDECMISRVTEALSKVKGSMGSHERHALPGVIGDDLLRFGKLPLCLFICIILTAVTVVTTAHHTRLLTAQREQLVLERDALDIEWRNLILEENALGDHSRKPKRQEEHANFISWRFALLCGCILLALAFLLGRVAWLQVISPDMLVKEGDMRSLRVQQVSTSRGMITDRSGRPLAVSVPVKAIWADPKEVHDAGGISVGDRWKALARVLLVRLTATLDRQRNIEVDAVIAATGLRPETALARRAGLTINRGVCVDSYLQTSNTDIYALGDCAEINGQVLPFLQPIQLSAMVLAKNLLGNNTPLKLPAMLVKIKTPELPLHLAGETQRQDLRWQINTERQGMVARGVDDADQLRAFVVSEDRMKEAFGLLKTLPIRATRLDTLLDPAFFFGAGNVHILGTNRAAVGLLEGFQQLAEFHAIMDGTTPRVLENAEGDRTTPSIIAYTQDGETLVGQPAKRQAVTNPQNTLFAIKRLIGRRFQDEEVQRDVSIMPFKIIAADNGDAWVEVKGQKMAPPQISAEVLKKMKKTAEDYLGEPVAVPTLSTLAWNAVREGGLIPTKCEYTYVLDCSWQPSYENEQNLIYDKTDTLNGRIKEGNQIFKDTIEPIDQLIVKPDHSSYESVSPLYDEIS

SEQ ID NO: 60582 - protein, 817 aa, Homo sapiens
  DOMAIN (683)..(699): MEMBRANE ALANYL DIPEPTIDASE (M1) FAMILY SIGNATURE domain identified by eMATRIX, accession number PR00756D, p-value=6.838e- 16, raw score of 10.58
  DOMAIN (507)..(773): Peptidase family M1 domain identified by PFam, accession name Peptidase_M1, E-value=1.7e-88, PFam score of 256.8
  misc_feature (1)...(817): Xaa = X or * as defined in Table 2
MIGGTTTPFILTPFSRLVTPKITEILGFNLPVDMIATSHGVVWRDNPTQIVELYLKWAADYQEDRITIFYDTMSNNTRMMADAIAXGIAETDPRVAVKIFNVARSDKNEILTNVFRSKGVLVGTSTMNNVMMPKIAGLVEEMTGLRFRNKRASAFGSHGWSGGAVDRLSTRLQDAGFEMSLSLKAKWRPDQDALKLCREHGREIARQWALAPLPQSTVNTVVKEETSATTTGGLRPTDAVQRLPVDLRSGKRRANAGRCARNAVETGIGGKMSNGIVIIGSGFAARQLVKNIRKQDATIPLTLIAADSMDEYNKPDLSHVISQGQRADDLTRQTAGEFAEQFNLHLFPQTWVTDIDAEARVVKSQNNQWQYDKLVLATGASAFVPPVPGQRFPASYTGKKARLDQHPYQLVPISPHAKAIINSDYNGPASMLSSWCITCSPSSQRRRLKLVSVHINDEPWTAWKEEEGALVISNLPERFTLKIINEISPAANTALEGLYQSGDALCTQCEAEGFRHITYYLDRPDVLARFTTKIIADKIKYPFLLSNGNRVAQGELENGRHWVQWQDPFPKPCYLFALVAGDFDVLRDTFTTRSGREVALELYVDRGNLDRAPWAMTSLKNSMKWDEERFGLEYDLDIYMIVAVDFFNMGAMENKGLNIFNSKYVLARTDTATDKDYLDIERVIGHEYFHNWTGNRVTCRDWFQLSLKEGLTVFRDQEFSSDLGSRAVNRINNVRTMRGLQFAEDASPMAHPIRPDMVIEMNNFYTLTVYEKGAEVIRMIHTLLGEENFQTGMQLYFERHDGSAATCDNLCRGRKMR

SEQ ID NO: 60583 - protein, 814 aa, Homo sapiens
  DOMAIN (464)..(482): CADHERIN SIGNATURE domain identified by eMATRIX, accession number PR00205B, p-value=8.364e-15, raw score of 11.39
  DOMAIN (50)..(580): Cadherin domain identified by PFam, accession name cadherin, E-value=2.3e-107, PFam score of 370.1
MDAAFLLVLGLLAQSLCLSLGVPGWRRPTTLYPWRRAPALSRVRRAWVIPPISVSENHKRLPYPLVQIKSDKQQLGSVIYSIQGPGVDEEPRGVFSIDKFTGKVFLNAMLDREKTDRFRLRAFALDLGGSTLEDPTDLEIVVVDQNDNRPAFLQEAFTGRVLEGAVPGTYVTRAEATDADDPETDNAALRFSILQQGSPELFSIDELTGEIRTVQVGLDREVVAVYNLTLQVADMSGDGLTATASAIITLDDINDNAPEFTRDEFFMEAIEAVSGVDVGRLEVEDRDLPGSPNWVARFTILEGDPDGQFTIRTDPKTNEGVLSIVKALDYESCEHYELKVSVQNEAPLQAAALRAERGQAKVRVHVQDTNEPPVFQENPLRTSLAEGAPPGTLVATFSARDPDTEQLQRLSYSKDYDPEDWLQVDAATGRIQTQHVLSPASPFLKGGWYRAIVLAQDDASQPRTATGTLSIEILEVNDHAPVLAPPPPGSLCSEPHQGPGLLLGATDEDLPPHGAPFHFQLSPRLPELGRNWSLSQVNVSHARLRPRHQVPEGLHRLSLLLRDSGQPPQQREQPLNVTVCRCGKDGVCLPGAAALLAGGTGLSLGALVIVLASALLLLVLVLLVALRARFWKQSRGKGLLHGPQDDLRDNVLNYDEQGGGEEDQDAYDISQLRHPTALSLPLGPPPLRRDAPQGRLHPQPPRVLPTSPLDIADFINDGLEAADSDPSVPPYDTALIYDYEGDGSVAGTLSSILSSQGDEDQDYDYLRDWGPRFARLADMYGHPCGLEYGARWDHQAREGLSPGALLPRHRGRTA

SEQ ID NO: 60584 - protein, 1360 aa, Homo sapiens
  DOMAIN (1021)..(1039): CADHERIN SIGNATURE domain identified by eMATRIX, accession number PR00205B, p-value=8.364e-15, raw score of 11.39
  DOMAIN (1146)..(1329): Cadherin cytoplasmic region domain identified by PFam, accession name Cadherin_C_term, E-value=1.1e-78, PFam score of 274.8
MALTLGSALATGSELMLGLAAQCTVRARKREREAGWRPCRVLALRPRPSRGITRKRRKAACDGPLLMKRPEQKNHGRGQQTWCQPVVCRAHTGPLIVDSPGAIRARRQPSLASKCVKVGMTPESVGSCSVGTPLPGVQVRIVSENPQREACSYTIHAEGDERGTKVTPGFEEKEGELLVRGPSVFREYWNKPEETKSAFTLDGWFKTGGPCSQSSQDGSGQLPKWRQAASKMVASVVFSDLGFLALWIPRNGILGHAPASASRSHSGLVRPGVSAAAQGDGKGLFQVTPLTATTMSSDVKGLSQVTPLTGHYDVFRRQRSVSGYFFDGHNDLCRCFDSTCPRSETHAHICHPGASWKVTVDGWAPLAGQMREQQQQQPLRALKRRGANSAPWQPLPREGPFQKPWGLCLIDQNPPGHAAFTGHWASLWGKGRNTGLLVGPQDPTKARLAGASLCAKGADQGDTVVFKDGQYWIRGRTSVDIIKTGGYKVSALEVEWHLLAHPSITGTATGFLGVISRVQDPTLSPALAGPGAFRVHRYPGTWGEAVSPPGESQSLCLSLGVPGWRRPTTLYPWRRAPALSRVRRAWVIPPISVSENHKRLPYPLVQGPGVDEEPRGVFSIAQFTGKVFLNAMLDREKTDRFRVRSCVVGPVPLKQAWWKASAPPPHQASPPRSVGFRPDCKIQAPLSEGAAGVFSWRQSLNVLSLSHGPNGSHRNLGATRASPCSMFEQLRGFALDLGGSTLEDPTDLEIVVVDQNDNRPAFLQEAFTGRVLEGAVPGTYVTRAEATDADDPETDNAALRFSILQQGSPELFSIDELTGEIRTVQVGLDREPHGNGSPLVVAVYNLTLQVADMSGDGLTATASAIITFDDINDNAPEFTRDESKSPSGLCCMGREHEVEPTEEDHGGTWGTVTHKTDKPEDTQWFFMEAIEAVSGVDVGRLEVEDRDLPGSPNWVARFTILEGDPDGQFTIRTDPKTNEGVLSIVKVSGPRLAHRCRQTQMPTHTDAHTQMPARTASQPRTATGTLSIEILEVNDHAPVLAPPPPGSLCSEPHQGPGLLLGATDEDLPPHGAPFHFQLSPRLPELGRNWSLSQVNVPPAPQHHPLITSHAACTQPGPWIANPGPLITKPPPFSSPVLVLLVALRARFWKQSRGKGLLHGPQDDLRDNVLNYDEQGGGEEDQDAYDISQLRHPTALSLPLGPPPLRRDAPQGRLHPQPPRVLPTSPLDIADFINDVDLRPPDVGSFPFLSPCLELTLPWAVATAGLEAADSDPSVPPYDTALIYDYEGDGSVAGTLSSILSSQGDEDQDYDYLRDWGPRFARLADMYGHPCGLEYGARWDHQAREGLSPGALLPRHRGRTA

SEQ ID NO: 60585 - protein, 574 aa, Homo sapiens
  DOMAIN (250)..(273): AROMATIC-RING HYDROXYLASE (FLAVOPROTEIN MONOOXYGENASE) SIGNATURE domain identified by eMATRIX, accession number PR00420A, p-value=7.750e-12, raw score of 14.78
  DOMAIN (148)..(381): Pyridine nucleotide-disulphide oxidoreducta domain identified by PFam, accession name pyr_redox, E-value=9.5e-55, PFam score of 188.0
MGRTTRRDAAQAPGTRRSGDSRGYPYVTRPEGTDADDPQKDKAALGSHRVAGQPELFSIDELTRRDPHSASGAWTARYTVSTIAAFALVIANRLYTIEEEATTPSGCGPASSSTSSRGVDMCLRNLCMHGYDATIPLTLIAADSMDEYNKPDLSHVISQGQRADDLTRQTAGEFAEQFNLHLFPQTWVTDIDAEARVVKSQNNQWQYDKLVLATGASAFVPPVPGRELMLTLNSQQEYRACETQLRDARRVLIVGGGLIGSELAMDFCRAGKAVTLIDNAASILASLMPPEVSSRLQHRLTEMGVHLLLKSQLQGLEKTDSGIQATLDRQRNIEVDAVIAATGLRPETALARRAGLTINRGVCVDSYLQTSNTDIYALGDCAEINGQRDGAGKKSSRQYTPLNSRRCLVKIKRRNYRCIWQAKPASGLRWQIIRSQEWWRRALGNLCSTSDEFAYSSAQATQKRKKKKHKKREGLNKHKEKKRKQKGQKDQKHREKPQQPDKEQENGKKRKKEHKENNEQSRKVKRKNQEETKRATKTKRNKKRNKQKQEAKTKRSNNKTMHIHRSPVCGLDRL

SEQ ID NO: 60586 - protein, 72 aa, Homo sapiens
  misc_feature (1)...(72): Xaa = X or * as defined in Table 2
MXISQDPHPRVXAAACTTLGQMATDFAPNFQKKFHXTVXXALLRTMENQGNQRVQSHAASALIIFIEDCPKS

SEQ ID NO: 60587 - protein, 199 aa, Homo sapiens; identical to SEQ ID NO: 35747

SEQ ID NO: 60588 - protein, 1126 aa, Homo sapiens
MPATASAGVPATVSEKQEFYQLLKNLINPSCMVRRQAEEIYENIPGLCKTTFLLDAVRNRRAGYEVRQMAAALLRRLLSSGFEEVYPNLPADVQRDVKIELILAVKLETHASMRKKLCDIFAVLARNLIDEDGTNHWPEGLKFLIDSIYSTNVALWEVALHVFWHFPGIFGTQERHDLDIIKRLLDQCIQDQDHPAIKTLSARAAAAFVLANENNIALFKDFADLLPGILQAVNDSCYQDDDSVLESLVEIADTVPKYLGPYLEDTLQLSLKLCGDSRLSNLQRQLALEVIVTLSETATPMLKKHTNIIAQAVPHILAMMVDLQDDEDWVNADEMEEDDFDSNAVAAESALDRLACGLGGKVVLPMTKEHIMQMLQSPDWKYRHAGLMALSAIGEGCHQQMESILDETVNSVLLFLQDPHPRVRAAACTTLGQMATDFAPNFQKKFHETVIAALLRTMENQGNQRVQSHAASALIIFIEDCPKSLLVLYVDSMVKNLHSVLVIKLQELIRNGTKLALEQLVTTIASVADTIEEKFVPYYDIFMPSLKHIVELAVQKELKLLRGKTIECISHIGLAVGKEKFMQDASNVMQLLLKTQSDLNNMEDDDPQTSYMVSAWARMCKILGKDFQQYLPLVIEPLIKTASAKPDVALLDTQDVENMSDDDGWQFVNLGDQQSFGIKTSGLEAKATACQMLVYYAKELREGFVEYTEQVVKLMVPLLKFYFHDNVRVAAAESMPFLLECARIRGPEYLAQMWQFICDPLIKAIGTEPDTDVLSEIMNSFAKSIEVMGDGCLNDEHLEELGGILKAKLEGHFKNQELRQVKRQEENYDQQVEMSLQDEDECDVYILTKVSDILHSLFSTYKEKILPWFEQLLPLIVNLICSSRPWPDRQWGLCIFDDIIEHCSPTSFKYVEYFRWPMLLNMRDNNPEVRQAAAYGLGVMAQFGGDDYRSLCSEAVPLLVKVIKCANSKTKKNVIATDNCFSAIGKILKFKPNCVNVDEVLPHWLSWLPLHEDKEEAIQTLSFLCDLIESNHPVVIGPNNSNLSKIISIIAEGKINETINYEDPCAQRLTNVVRQVQTSEDLWVGNVYPQLGWMEQQGSLYRELAKFCLKHFNITWNIIYYKSNYK

SEQ ID NO: 60589 - protein, 565 aa, Homo sapiens
  DOMAIN (452)..(484): Transketolase proteins domain identified by eMATRIX, accession number BL00801F, p-value=8.286e-24, raw score of 23.45
  DOMAIN (452)..(557): Transketolase domain identified by PFam, accession name transketolase, E-value=6.7e-66, PFam score of 232.4
MVSAALAGAHQWPSATASAALPLKVTGPLARNPTPPWTAAAALATRGQRPEKGLFPGPAPFSLGKRKRGRGRTWERRRRVSIETSTCFRPGCERLGAAAGANLSQLASSQRPLRERWVLYTIIMAAAGAPDGMEEPGMDTEAETVATEAPARPVNCLEAEAAAGAAAEDSGAARGSLQPAPAQPPGDPAAQASVSNGEDAGGGAGRELVDLKIIWNKTKHDVKFPLDSTGSELKQKIHSITGFLHLGGLRTALYNYIFAKKYQGSFILRLEDTDQTRVVPGAAENIEDMLEWAAWRVLGSCPATKRNEVCRYPQGIAGLRPWFMLTFQSGNSWAMWNVQIKPMTNVRRAFQGVNNCSRAANTTATYISCANTLRVNHKEVPGRVTQLCRQYSDMPPLTLEGIQDRVLYVLKLYDKIDPEKTPRPILGDSQRYQFHVCFQRVTAQHAAVGVHPELIFIATGSEVELAVAAYEKLTAEGVKARVVSMPSTDAFDKQDAAYRESVLPKAVTARVAVEAGIADYWYKYVGLNGAIVGMTTFGESAPAELLFEEFGFTVDNVVAKAKELL

SEQ ID NO: 60590 - protein, 76 aa, Homo sapiens
PQDEAPLVLLSKDVVVQGSAEATQVQEACGAGSEPHSHRNPGISAQVGLAPSYGAARGRRRPLALQQSPQERRHVG

SEQ ID NO: 60591 - protein, 534 aa, Homo sapiens
  DOMAIN (324)..(376): Ubiquitin domain proteins domain identified by eMATRIX, accession number BL00299, p-value=2.823e-10, raw score of 28.84
MGSRCLNPPPPAHSDTTGKDSFGNIRGAETGQGASACSVTSARVTCGAGSEPHSHRNPGISAQVGLAPSYGAARGRRRPLALQQSPQERRHVGWNSTRGLLPASLPGTASSQSASATASAALPLKVTGPLARNPTPPWTAAAALATRGQRPEKGLFPGPAPFSLGKRKRGRGRTWERRRRVSIETSTCFRPGCERLGAAAGANLSQLASSQRPLRERWVLYTIIMAAAGAPDGMEEPGMDTEAETVATEAPARPVNCLEAEAAAGAAAEDSGAARGSLQPAPAQPPGDPAAQASVSNGEDAGGGAGRELVDLKIIWNKTKHDVKFPLDSTGSELKQKIHSITGLPPAMQKVMYKGLVPEDKTLREIKVTSGAKIMVVGSTINDVLAVNTPKDAAQQDAKAEENKKEPLCRQKQHRKVLDKGKPEDVMPSVKGAQERLPTVPLSGMYNKSGGKVRLTFKLEQDQLWIGTKERTEKLPMGSIKNVVSDPIEGHEDYHNDGRFQLAPTEASYYWVYWVPTQYVDAIKDTVLGKWQYF

SEQ ID NO: 60592 - protein, 114 aa, Homo sapiens
WLFPPNPPVFRGQHPRQGLGPPSAAGRRAMKKKLVVLCLLAVVLVLVIVGLCLWLPSASKEPDNHVYTRATVAADAKQCSEIGRKAEVINAREVAPSVAFASMFNSSEQSQKAL

SEQ ID NO: 60593 - protein, 605 aa, Homo sapiens
  DOMAIN (168)..(205): Gamma-glutamyltranspeptidase proteins domain identified by eMATRIX, accession number BL00462B, p-value=1.000e-40, raw score of 17.88
  DOMAIN (91)..(601): Gamma-glutamyltranspeptidase domain identified by PFam, accession name G_glu_transpept, E-value=1.1e-281, PFam score of 949.1
GRPRLFPQLFPPNPPVFRGQHPRQGLGPPSAAGRRAMKKKLVVLGLLAVVLVLVIVGLCLWLPSASKEPDNHVYTRAAVAADAKQCSKIGRDALRDGGSAVDAAIAALLCVGLMNAHSMGIGGGLFLTIYNSTTRKAEVINAREVAPRLAFATMFNSSEQSQKGGLSVAVPGEIRGYELAHQRHGRLPWARLFQPSIQLARQGFPVGKGLAAALENKRTVIEQQPVLCEVFCRDRKVLREGERLTLPQLADTYETLAIEGAQAFYNGSLTAQIVKDIQAAGGIVTAEDLNNYRAELIEHPLNISLGDAVLYMPSAPLSGPVLALILNILKGYNFSRESVESPEQKGLTYHRIVEAFRFAYAKRTLLGDPKFVDVTEVVRNMTSEFFAAQLRAQISDDTTHPISYYKPEFYTPDDGGTAHLSVVAEDGSAVSATSTINLYFGSKVRSPVSGILFNNEMDDFSSPSITNEFGVPPSPANFIQPGKQPLSSMCPTIMVGQDGQVRMVVGAAGGTQITTATALAIIYNLWFGYDVKRAVEEPRLHNQLLPNVTTVERNIDQAVTAALETRHHHTQIASTFIAVVQAIVRTAGGWAAASDSRKGGEPAGY

SEQ ID NO: 60594 - protein, 623 aa, Homo sapiens
  DOMAIN (242)..(297): Gamma-glutamyltranspeptidase proteins domain identified by eMATRIX, accession number BL00462C, p-value=1.000e-40, raw score of 27.41
  DOMAIN (102)..(620): Gamma-glutamyltranspeptidase domain identified by PFam, accession name G_glu_transpept, E-value=3.8e-276, PFam score of 930.8
RQREVTRSPPERSGLRVLQLFPPNPPVFRGQHPRQGLGPPSAAGRRAMKKKLVVLGLLAVVLVLVIVGLCLWLPSASKEPDNHVYTRAAVAADAKQCSKIGRDALRDGGSAVDAAIAALLCVGLMNAHSMGIGGGLFLTIYNSTTRKAEVINAREVAPRLAFATMFNSSEQSQKGGLSVAVPGEIEGYELAHQRHGRLPWARLFQPSIQLARQGFPVGKGLAAALENKRTVIEQQPVLCEVFCRDRKVLREGERLTLPQLADTYETLAIEGAQAFYNGSLTAQIVKDIQAAGGIVTAEDLNNYRAELIEHPLNISLGDAVLYMPSAPLSGPVLALILNILKGYNFSRESVESPEQKGLTYHRIVEAFRFAYAKRTLLGDPKFVDVTEASSGVSAVVRNMTSEFFAAQLRAQISDDTTHPISYYKPEFYTPDDGGTAHLSVVAEDGSAVSATSTINLYFGSKVRSPVSGILFNNEMDDFSSPSITNEFGVPPSPANFIQPGKQPLSSMCPTIMVGQDGQVRMVVGAAGGTQITTATALAIIYNLWFGYDVKRAVEEPRLHNQLLPNVTTVERNIDQAVTAALETRHHHTQIASTFIAVVQAIVRTAGGWAAASDSRKGGEPAGY

SEQ ID NO: 60595 - protein, 92 aa, Homo sapiens
  misc_feature (1)...(92): Xaa = X or * as defined in Table 2
GRTLVPHGGLPHHYLVQCEWLPGTSXAEFPVVHLPAFVARARGADRQHHGPFLPLCHLHPARPRREDLHRKSPGEPNPIEHHRSSGPGCRRI

SEQ ID NO: 60596 - protein, 302 aa, Homo sapiens
  DOMAIN (52)..(92): Gamma-glutamyltranspeptidase proteins domain identified by eMATRIX, accession number BL00462D, p-value=7.811e-31, raw score of 23.07
  DOMAIN (1)..(268): Gamma-glutamyltranspeptidase domain identified by PFam, accession name G_glu_transpept, E-value=2.5e-08, PFam score of - 63.1
MLFRPALGSRQVVRNMTSEFFAAQLRAQISDDTTHPISYYKPEFYTPVDGGTAHLSVVAEDGSAVSTTSTINLYFGSKVRSPVSEILFNDEMDDFSSPNITNEFGVPPSPANFIQPGMGWRKQPLSSMCPTIMVGQDGQVRMVVGAAGGTQITTATALICVTAFLPGRAHPAQPPSHADHTPMPQAIIYNLWFGYDVKRAVEEPRLHNQLLPNVTTVERNIDQAVTAALETRHHHTQIASTFIAVVQAIVHTAGGWAAASDSRKGGAYRILSALQEDKADKQSRDKILTRTRKGTLGDWLPM

SEQ ID NO: 60597 - protein, 251 aa, Homo sapiens
  DOMAIN (62)..(102): Gamma-glutamyltranspeptidase proteins domain identified by eMATRIX, accession number BL00462D, p-value=3.769e-36, raw score of 23.07
  DOMAIN (1)..(250): Gamma-glutamyltranspeptidase domain identified by PFam, accession name G_glu_transpept, E-value=3.9e-09, PFam score of - 41.4
DLCPLPTLPPHLLRPALGSRQVVRNMTSEFFSAQLRAQISDDTTHPISYYKPEFYMPDDGGTAHLSVVAEDGSAVSATSTINLYFGSKVRSPVSGILLNNEMDDFSSTSITNELGVPPSPANFIQPGKQPLSSMCPTIMVGQDGQVRMVVGAAGGTQITMATALAIIYQPSWFGYDVKRAVEEPRLHNQLLPNVTTVERNIDQAVTAALETRHHHTQIASTFIAVVQAIVRTAGGWAAASDSRKGGEPAGY

SEQ ID NO: 60598 - protein, 542 aa, Homo sapiens
  DOMAIN (101)..(138): Gamma-glutamyltranspeptidase proteins domain identified by eMATRIX, accession number BL00462B, p-value=1.000e-40, raw score of 17.88
  DOMAIN (43)..(538): Gamma-glutamyltranspeptidase domain identified by PFam, accession name G_glu_transpept, E-value=2.5e-174, PFam score of 592.6
MKKKLVVLGLLAVVLVLVIVSLCLWLPSASKEPDNHVYTRAAVAADAKQCLEIGRVLVGGPAYLLLLGKAEVINAREVAPRLAFASMFNSSEQSQKGGLSVAVPGEIRGYELAHQRHGRLPWARLFQPSIQLARQGFPVGKGLAAVLENKRTVIEQQPVLWYVCGKVLWEGERLTLPRLADTYEMLAIEGAQAFYNGSLMAQIVKDIQAAGGIVTAEDLNNYRAELIEHPLNISLGDAVLYMPSARLSGPVLALILNILKGYNFSRESVETPEQKGLTYHRIVEAFRFAYAKRTLLGDPKFVDVTENLIAGLLCARMDSPALGSQQVVRNMTSEFFAAQLRSQISDHTTHPISYDKPEFYTPDDGGTAHLSVVAEDGSAVSATSTINLYITNEFGAPPSPANFIQPGKQPLLSMCPTIMVGQDGQVRMVVGAAGGTQITTDTALPPSHADHTPMPQAIIYNLWFGYDVKRAVEEPRLHNKLLPNVTTVERNIDQAVTAALETRHHHTQIASTFIAVVQAIVRTAGGWAAASDSRKGGEPAGY

SEQ ID NO: 60599 - protein, 639 aa, Homo sapiens
  DOMAIN (195)..(232): Gamma-glutamyltranspeptidase proteins domain identified by eMATRIX, accession number BL00462B, p-value=1.000e-40, raw score of 17.88
  DOMAIN (119)..(639): Gamma-glutamyltranspeptidase domain identified by PFam, accession name G_glu_transpept, E-value=3.3e-239, PFam score of 808.1
PSGEREGCLIRESLKKILWLQASAECEGDPGYFLSYFHQILLSFVANTPRQGLGPPSAAGRRAMKKKLVVLGLLAVVLELVIVGLCLWLPSASKEPDNHVYTRAAVAADANLCSKIGRDALRDGGSAVDAAIAALLCVGLMNAHSMGIGGGLFLTIYNSTTRKAEVINAREVAPRLAFATMFNSSEQSQKGGLSVAVPGEIRGYELAHQRHGRLPWARLFQPSIQLARQGFPVGKGLAAALENKRTVIEQQPVLCEVFCRDRKVLREGERLTLPQLADTYETLAIEGAQAFYNGSLTAQIVKDIQAAGGIVTAEDLNNYRAELIEHPLNISLGDAVLYMPSAPLSGPVLALILNILKGYNFSRESVESPEQKGLTYHRIVEVFRFAYAKRTLLGDPKFVDVTEASSGVSAVVRNMTSEFFAAQLRAQISDDTTHPISYYKPEFYTPDDGGTAHLSVVAEDGSAVSATSTINLYFGSKVRSPVSGILFNNEMGDLSSPSITNEFGAPPSPANFIQPGKQPLLSMCLTIMVGQDGQVRMVVGAAGGTQITTDTALAIIYNLCFGYDVKRAVEEPRLHNKLLPNVTTVERNIDQAVTAALETRHHHTQIASTFIAVVQAIVRTAGGWAAASDSRKGGEPAGY

SEQ ID NO: 60600 - protein, 641 aa, Homo sapiens
  DOMAIN (137)..(174): Gamma-glutamyltranspeptidase proteins domain identified by eMATRIX, accession number BL00462B, p-value=1.000e-40, raw score of 17.88
  DOMAIN (78)..(604): Gamma-glutamyltranspeptidase domain identified by PFam, accession name G_glu_transpept, E-value=4e-200, PFam score of 678.2
GRPRLFPQLFPPNPPVFRGQHPRQGLGPPSAAGRRAMKKKLVVLGLLAVVLVLVIVGLCLWLPSASKEPDNHVYTRAAVAADAKQCSEIGRVLVGGPAYLLLLGKAEVINAREVAPRLAFASMFNSSEQSQKGGLSVAVPGEIRGYELAHQRHGRLPWARLFQPSIQLARQGFPVGKGLAAVLENKRTVIEQQPVLWYVCGKVLREGERLTLPRLADTYEMLAIEGAQAFYNGSLMAQIVKDIQAAGGIVTAEDLNNYRAELIEHPLNISLGDAVLYMPSARLSGPVLALILNILKGYNFSRESVETPEQKGLTYHRIVEAFRFAYAKRTLLGDPKFVDVTENSIAGLLCARMDSPALGSRQVVRNMTSEFFAAQLRSQISDHTTHPISYYKPEFYTPDDGGTAHLSVVAEDGSAVSATSTINLYFGSKVCSPVSGILFNNEMDDFSSPAFTNEFGAPPSPANFIQPGKQPLLSMCLTIMVGQDGQVRMVVGAAGGTQITTDTALPPSHADHTPMPQAIIYNLWFGYDVKRAVEEPRLHNKLLPNVTTVERNIDQAVTAALETRHHHTQIASTFIAVVQAIVRTAGGWAAALDSRKVPTPGAGFWEGLVEVGWWEAVITAQHLDITRGTGARGQGPSWLCL

SEQ ID NO: 60601 - protein, 144 aa, Homo sapiens
LLLLPEPLSSYWVWGHTCRLLIPKDPLPISLHRSSGIQPICASFSQEPPDLSRLLCNTASCTESISRIAWRLAGRLAFPGSAFPISLSFLPRPICPSFPPPPSPLCSPLFPLPTRVALLSLSPLSSSVFGAPEAAGDSPLEQRD

SEQ ID NO: 60602 - protein, 141 aa, Homo sapiens; identical to SEQ ID NO: 37604
  DOMAIN (4)..(19): CAP protein domain identified by eMATRIX, accession number BL01088A, p-value=7.097e-15, raw score of 7.26

SEQ ID NO: 60603 - protein, 631 aa, Homo sapiens
  DOMAIN (473)..(519): CAP protein domain identified by eMATRIX, accession number BL01088F, p-value=1.000e-40, raw score of 14.83
  DOMAIN (119)..(628): CAP protein domain identified by PFam, accession name CAP, E- value=1.2e-224, PFam score of 759.7
  misc_feature (1)...(631): Xaa = X or * as defined in Table 2
WADEETWLCLPHLPVFSPTAHLPLLSSTPFSSLLPFISTPHPRGFALPLPPSARLYLELRKLPATLPWSSVTDTGSYLSGRRERGGEGEGPGRRVRVADHGFALPRTGPQGSEEELANMQGLVERLERAVSRLESLSAESHRPPGNCGEVNGVIAGVAPSRGKPLHKLMDSMVAEFLKNSRILSGDVETLAEIVHSAFQAQRAFLLMASQYQQPHENDVAALLKPISEKIKEIQTFQRERTRGSNMFNHLSAVSEXIPCPLDGIAVSPKPGPYVKEMNDAATFYTNRVLKDXKQSDLRHVDWVKSYLNIWSELQAYIKEHHTTGLTWESKTGPVASTVSAFSVLSSGAWGFPPPPPPLPPPGPPSTFSEEWKGKKEESSPSRSALFAQLNQGEKAITKGLRHVTDDQKTYKNPSLRAQGGQTQSPTKSHTPSPTSPKSYPSQKHAPVLELEGKKWRVEYQEDRIDLVISETELKQVAYIFKCEKSTIQIKGKVNSIIIDNCKKLGLVFDNVVGIVEVINSQDIQIQVMGRVPTISINKTEGCHIYLSEDALDCEIVSAKSIWKWNILYPPQGWVDYREFPHFPEQFKTSAWDGSKLITEPAEIMALTSLRDRTPSPESPSIKTNKKAAVKS

SEQ ID NO: 60604 - protein, 167 aa, Homo sapiens
  misc_feature (1)...(167): Xaa = X or * as defined in Table 2
MTDTRMEGMNFQQMIQQAVERNGGDVKAAENFDNVTRLDRFTTDLTLKDGVVTLNDMQGQSPVLALTGEGMLNLADQTCDTQFDIRVVGGWNGESKLIDFLKETPVPLRVYGNWQQLNYSLQVDQLLRKHLQDEAKRRLNDWAERNKDSRNGKDVKKLLEKMPDKTX

SEQ ID NO: 60605 - protein, 154 aa, Homo sapiens
MSLAGDFSGNGIDADAFRLTWQGQAHVEMSDTRMEGMIFQQMIQQAVERNGGDVKAAENFDNVTRLDRFTTDLTLKDGVVTLNDMQGQSPVLALTGEGMLNLADQTCHTQFDIRVVGGWNGKSKLIDFLKATPVPLRVYGNWQQLNYSLQVDPR

SEQ ID NO: 60606 - protein, 155 aa, Homo sapiens [sequence omitted]

SEQ ID NO: 60607 - protein, 567 aa, Homo sapiens
  DOMAIN (495)..(567): Bacterial regulatory helix-turn-helix protei domain identified by PFam, accession name HTH_1, E-value=0.022, PFam score of 14.9
  misc_feature (1)...(567): Xaa = X or * as defined in Table 2
MEGNLQREATVISEQKVKETEILAKKPIHNSKEKIAKMEHGPKAVTIANSPSKPSEKDSVVSLESQKTPADPKLKTLSQTKKNKGSDSSLSGNSDGGEEFXCEEEKEYFDDSTEERFYKQSSMSEDSDSGDDFFIGKVRRTRKKESSCHSSVKEQKPLEKVFLKEDTGETHGDTRNDKIKPSTETRKLESVFFHSLSGSKSSRRDCPLCHGAAATWSWAFGIALAVALHNIPAQSDKQKDEQKTERITKRNDGKTECEEKEKKVTKSERLNFSRLLKRKAKRKNNLIDVKQNLEYLLEGTHTSKSLNDNDNTDENTFMSRAKTTWWTINSLTLEDPQTVDTQFDIRVVGGWNGESKLIDFLKETPVPLRVYGNWQQLNYSLQVDQLLRKHLQDEAKRRLNDWAERNKDSRNGKDVKKLLEKMFWNTLQILHQQPGNGVIFTFFIQRQRHILHQNLQRDMTISRPGTVRILLNILAGVTLHFGRKYGPVRGPKACFDDPLFVNSPLGLSPTPLMVSMEQNLAEWMQMSNLLLDKPHHQTPRGLKFELAAESPLMMIMLNALSKQIYQR

SEQ ID NO: 60608 - protein, 53 aa, Homo sapiens
LLLVVTMSNTSTMIGAGSKDAGTLNHGSKPLPPNPEEKKKKDRFYRSILPGDK

SEQ ID NO: 60609 - protein, 110 aa, Homo sapiens
  DOMAIN (15)..(65): P21-Rho-binding domain identified by PFam, accession name PBD, E-value=0.0012, PFam score of 24.8
MIAANKKKEKERPEISLPSDFEHTIHVGFDAVTGEFTVAIKQMNLQQQPKKELIINEILVMRENKNPNIVNYLDRYGVVGPIRGKGPLGLIGGEAVREEGSASPQNCLHL

SEQ ID NO: 60610 - protein, 587 aa, Homo sapiens
  DOMAIN (388)..(407): TYROSINE KINASE CATALYTIC DOMAIN SIGNATURE domain identified by eMATRIX, accession number PR00109B, p-value=7.488e-14, raw score of 12.27
  DOMAIN (279)..(542): Eukaryotic protein kinase domain identified by PFam, accession name pkinase, E-value=1.7e-59, PFam score of 211.1
  misc_feature (1)...(587): Xaa = X or * as defined in Table 2
LLLVVTMSNNGLDIQDKPPAPPMRNTSTMIGAGSKDAGTLNHGSKPLPPNPEEKKKKDRFYRSILPGDKTNKKKEKERPEISLPSDFEHTIHVGFDAVTGEFTGMPEQWARLLQTSNITKSEQKKNPQAVLDVLEFYNSKKTSNSQKYMSFTSGDKSAHGYIAAHPSSTKTASEPPLAPPVSEEEDEEEEEEEDENEPPPVIAPRPEHTKSIYTRSVVESIASPAVPNKEVTPPSAENANSSTLYRNTDRQRKKSKMTDEEILEKLRSIVSVGDPKKKYTRFEKIGQGPSGTVYTAMDVATGQEVAIKQMNLQQQPKKELIINEILVMRENKNPNIVNYLDSYLVGDELWVVMEYLAGGSLTDVVTETCMDEGQIAAVCRECLQALEFLHSNQVIHRDIKSDNILLGMDGSVKLTDFGFCAQITPEQSKLSTHGXGTPYWMAPEVVDTERAYGPKVLDIWSLGIMAIEMIEGEPPYLNENPLRALYLIATNGTPELQNPEKLSAIFRDFLNRCLEMDVEKRGFSSKELLQHQFLKIGQAPSPSLTPHXLLQPKEATKEQSPKTHTHPQPHCAQAFCEINAHFRNSNS

SEQ ID NO: 60611 - protein, 112 aa, Homo sapiens
  DOMAIN (65)..(101): PTR2 family proton/oligopeptide symporters proteins domain identified by eMATRIX, accession number BL01022E, p-value=1.173e- 12, raw score of 23.51
  DOMAIN (45)..(96): POT family domain identified by PFam, accession name PTR2, E- value=6.3e-10, PFam score of 35.9
SQPGQHLCGPESPGQQLHGVLEMERLHYIHHNETVSQQIGEVLYNAAPLSIWWQIPQYLLIGISEIFASIPGLEFAYSEAPRSMQGAIMGIFFCLSGVGSLLGSSIVALLSL

SEQ ID NO: 60612 - protein, 548 aa, Homo sapiens
  DOMAIN (79)..(134): POT family domain identified by PFam, accession name PTR2, E- value=7.6e-05, PFam score of 18.9
MSKPQPLRARTLATLLLEAFPFIYHPLNITDGRPALSQLSGAGVGGSSSQGERAPGTKNFLNHFLWNSANPANISVALRAQGSSYTIPEAWLLLANVVVVLILVPLKDRLIDPLLLRCKLLPSALQKMALGMFFGFTSVIVAAPFHPQVRSPLSDSILGEQALAVTDDKVSVLELRVQPVMGISLTLSRGTAHPGEEVALSLWLSFSDHTVAPAELYDHRDLGLSVSAEEPGAILPAEEQGAQLGVVWGCGKDQCSEGSETGQEKGRGLAGGLHGPEAAQLFVDCGQAPLDPVYLPAALELLDAPEHFRVQQVGHYPPANSSLSSRSETFLLLQPWPRAQPLLRASYPPFATQQVVPPRVTEPHQRPVPWDVRAVSVEAAVTPAEPYARVLFHLKGQDWPPGSGSLPCARLHATHPAGTAHQACRFQQSDVEREARWKRKSPRRDLGVAGSGGRWIWGSQDLRVVGSGGPWIWGLWYLGVAGSGVTGSGGHGIWGSLEPTPHLLHQNSLTEDLHTSQSSTVLMERSGHKMWQLILSDAICGPCLDPGS

SEQ ID NO: 60613 - protein, 110 aa, Homo sapiens
  DOMAIN (10)..(48): POT family domain identified by PFam, accession name PTR2, E- value=0.00021, PFam score of 17.4
IPEAWLLLANVVVVLILVPLKDRLIDPLLLRCKLLPSALQKMALGMFFGFTSVIVAAPFHPQVRSPLSDSILGEQALAVTDDKVSVLELRVQPVMGISLTLSRGTAHPGE

SEQ ID NO: 60614 - protein, 90 aa, Homo sapiens
ADPACPGPSCWRPAARPRRLLITSSSCFSNAHIRPSWGQALPPASEPPQPTPDWRCASITALAPKWTAGETLSYGDPGGAHSLKGLEARF

SEQ ID NO: 60615 - protein, 563 aa, Homo sapiens
  DOMAIN (337)..(350): PTR2 family proton/oligopeptide symporters proteins domain identified by eMATRIX, accession number BL01022D, p-value=3.455e- 11, raw score of 9.42
  DOMAIN (329)..(397): POT family domain identified by PFam, accession name PTR2, E- value=2.3e-16, PFam score of 57.5
MDTPLRRSRRLGGLRPESPESLTSVSRTRRALVEFESNPEETREPGSPPSVQRAGLGSPERPPKTSPGSPRLQQGAGLESPQGQPEPGAASPQRQQDLHLESPQRQPEYSPESPRCQPKPSEEAPKCSQDQGVLASELAQNKEELTPGAPQHQLPPVPGSPEPYPGQQAPGPEPSQPLLELTPRAPGSPRGQHEPSKPPPAGETVTGGFGAKKRKGSSSQAPASKKLNKEELPVIPKGKPKSGRVWKDRSKKRGSQENGRAVDGHVELEEAGSARAEGQRDSFCIRTRGSRALVQRPRKIKLHEQIKGQMPGILLLIKVDFRGKVMDLGRDATRRFFNWFYWSINLGAVLSLLVVAFIQQNISFLLGYSIPVGCVGLAFFIFLFATPVFITKPPMGSQVSSMLKLALQNCCPQLWQRHSARSKLSQGQQGNNGSESKLHLLVAKWQHTLGRVELTVAVFGDDYTNIVPFGISKDSARLLDKKRDRQCARVLADERSPQPGASPQEDIANFQVLVKILPVMVTLVPYWMVYFQLSAAARRNRGAPRVSSAGCWAAAQRPRRRAP

SEQ ID NO: 60616 - protein, 88 aa, Homo sapiens
  misc_feature (1)...(88): Xaa = X or * as defined in Table 2
GHAWQLASIWLLCLLWPAVPLNCLSSYGWTLWWRIALVGAXRSLAPSRGSWSTQARPLKQRRTKWCGKSWCLSGTSEPLSHWPRLRSW

SEQ ID NO: 60617 - protein, 110 aa, Homo sapiens
  misc_feature (1)...(110): Xaa = X or * as defined in Table 2
RTDTYHLEDSKEQSGNRAGSGGWLXSCAEGRRVALKSWPGRTGMSGTRRVTASSRGTSWYCGGSAGRSSTPPTGRACSPGSFSSPEPQPPGPSAAGSSVSGQLGPCGGGL

SEQ ID NO: 60618 - protein, 590 aa, Homo sapiens
  DOMAIN (34)..(47): PTR2 family proton/oligopeptide symporters proteins domain identified by eMATRIX, accession number BL01022D, p-value=3.455e- 11, raw score of 9.42
  DOMAIN (26)..(518): POT family domain identified by PFam, accession name PTR2, E- value=4.4e-37, PFam score of 127.1
MGSGPLTGELYMNEVDRSEYQVMDLGRDATRRFFNWFYWSINLGAVLSLLVVAFIQQNISFLLGYSIPVGCVGLAFFIFLFATPVFITKPPMGSQVSSMLKLALQNCCPQLWQRHSARKCEDDQGLDSEDGSKDKDDGVGIYTEDTNIGNADDSGIKGEDDGDDVSNEGFLSDWAQSGRSASRDGAGVAVIWDLERARTSESAHLHGWQSMWAVGCELRWDCVDQSTLVPIRVVLPCGLNFSQRRVKLSQGQQGNNGSESKLHLLVAKWQHTLGRVELTVAVFGDDYTNIVPFGISKDSARLLDKKRDRQCARVLADERSPQPGASPQEDIANFQVLVKILPVMVTLVPYWMVYFQMQSTYVLQGLHLHIPNIFPANPANISVALRAQGSSYTIPEAWLLLANVVVVLILVPLKDRLIDPLLLRCKLLPSALQKMALGMFFGFTSVIVAGVLEMERLHYIHHNETVSQQIGEVLYNAAPLSIWWQIPQYLLIGISEIFASIPGLEFAYSEAPRSMQGADGQAKCPLCLSSLSKTAAPSCGNDTRPETVNVPACWPTRGLPSQGFPARGHRQLPGAGEDLARHGDPGALLD

SEQ ID NO: 60619 - protein, 868 aa, Homo sapiens
MLTMSVTLSPLRSQDLDPMATDASPMAINMTPTVEQGEGEEAMKDMDSDQQYEKPPPLHTGADWKIVLHLPEIETWLRMTSERVRDLTYSVQQDSDSKHVDVHLVQLKDICEDISDHVEQIHALLETEFSLKLLSYSVNVIVDIHAVQLLWHQLRVSVLVLRERILQGLQDANGNYTRQTDILQAFSEETKEGRLDSLTEVDDSGQLTIKCSQNYLSLDCGITAFELSDYSPSEDLLSGLGDMTSSQVKTKPFDSWSYSEMEKEFPELIRSVGLLTVAADSISTNGSEAVTEEVSQVSLSVDDKGGCEEDNASAVEEQPGLTLGVSSSSGEALTNAAQPSSETVQQESSSSSHHDAKNQQPVPCENATPKRTIRDCFNYNEDSPTQPTLPKRGLFLKEETFKNDLKGNGGKRQMVDLKPEMSRSTPSLVDPPDRSKLCLVLQSSYPNSPSAASQSYECLHKVGNGNLENTVKFHIKEISSSLGRLNDCYKEKSRLKKPHKTSEEVPPCRTPKRGTGSGKQAKNTKSSAVPNGELSYTSKAIEGPQTNSASTSSLEPCNQRSWNAKLQLQSETSSSPAFTQSSESSVGSDNIMSPVPLLSKHKSKKGQASSPSHVTRNGEVVEAWYGSDEYLALPSHLKQTEVLALKLENLTKLLPQKPRGETIQNIDDWELSEMNSDSEIYPTYHVKKKHTRLGRVSPSSSSDIASSLGESIESGPLSDILSDEESSMPLAGMKKYADEKSERASSSEKNESHSATKSALFQILMQDIQHQDNYEALWEKIEGLVNKLDEFIQWLNEAMETTENWTPPIAEMDDLKLYLETHLSFKLNVDSHCALKEAVEEEGHQLLELIASHKAGLKDMLRMIASQW

SEQ ID NO: 60620 - protein, 661 aa, Homo sapiens
GRLDSLTEVDDSGQLTIKCSQNYLSLDCGITAFELSDYSPSEDLLSGLGDMTSSQVKTKPFDSWSYSEMEKEFPELIRSVGLLTVAADSISTNGSEAVTEEVSQVSLSVDDKGGCEEDNASAVEEQPGLTLGVSSSSGEALTNAAQPSSETVQQESSSSSHHDAKNQQPVPCENATPKRTIRDCFNYNEDSPTQPTLPKRGLFLKEETFKNDLKGNGGKRQMVDLKPEMSRSTPSLVDPPDRSKLCLVLQSSYPNSPSAASQSYECLHKVGNGNLENTVKFHIKEISSSLGRLNDCYKEKSRLKKPHKTSEEVPPCRTPKRGTGSGKQAKNTKSSAVPNGELSYTSKAIEGPQTNSASTSSLEPCNQRSWNAKLQLQSETSSSPAFTQSSESSVGSDNIMSPVPLLSKHKSKKGQASSPSHVTRNGEVVEAWYGSDEYLALPSHLKQTEVLALKLENLTKLLPQKPRGETIQNIDDWELSEMNSDSEIYPTYHVKKKHTRLGRVSPSSSSDIASSLGESIESGPLSDILSDEESSMPLAGMKKYADEKSERASSSEKNESHSATKSALIQKLMQDIQHQDNYEAIWEKIEYFTWLTLLKSRKGGFFQMKKLRQYVIRKLAQVLTATHKKGKMEGSHLSSYGYDLEVTHATFARIPLAHFVT

SEQ ID NO: 60621 - protein, 233 aa, Homo sapiens
  DOMAIN (2)..(82): Glycosyl hydrolase family 3 C termina domain identified by PFam, accession name Glyco_hydro_3_C, E-value=0.06, PFam score of - 25.1
MIDEAVQTAKQSDVVVAVVGEAQGMAHEASSRTDITIPQSQRDLIAALKATGKPLVLVLMNGRPLALVKEDQQADAILETWFAGTEGGNAIADVLFGDYNPSGKLPMSFPRSVGQIPVYYSHLNTGRPYNADKPNKYTSRYFDEANGALYPFGYGLSYTTFTVSDVKLSAPTMKRDGKVTASVQVTNTGKREGATVVQMYLQDVTASMSRPVKQLKGFEKIRIMTWRIRNRVG

SEQ ID NO: 60622 - protein, 311 aa, Homo sapiens
  DOMAIN (97)..(125): NAD-dependent DNA ligase proteins domain identified by eMATRIX, accession number BL01055E, p-value=1.000e-08, raw score of 14.74
MENGSSKRCRRDPATDRMCCKGTSDCHSRGSPGLWCAASPAKGRLDVLPVGNVRMAARQLQPVRITTREECKIPGLLDGDRQGNDVSAMRVDIGARSYDEVMQAGIRPGDRVTFDTTFQVLPHQRVMGKAFDDRLGCYLLVTLLRELHDAELPAEVWLVASSSEEVGLRGGQTATRAVSPDVAIVLDTACWAKNFDYGAANHRQIGNGPMLVLSDKSLIAPPKLTAWVETVAAEIGVPLQADMFSNGGTDGGAVHLTGTGVPTVVMGPATRHGHCAASIADCRDILQMQQLLSALIQRLTRETVVQLTDFR

SEQ ID NO: 60623 - protein, 497 aa, Homo sapiens
  DOMAIN (145)..(173): NAD-dependent DNA ligase proteins domain identified by eMATRIX, accession number BL01055E, p-value=1.000e-08, raw score of 14.74
MALTVQKVYILYLYGALPMLALSLSLKSQQNDQQQTAEDASNDSHNDSDYWTLMVLGSVLIRLNESTGPKVMICAHMDEVGFMVRSISREGAIDVLPVGNVRMAARQLQPVRITTREECKIPGLLDGDRQGNDVSAMRVDIGARSYDEVMQAGIRPGDRVTFDTTFQVLPHQRVMGKAFDDRLGCYLLVTLLRELHDAELPAEVWLVASSSEEVGLRGGQTGTRAVSPDVAIVLDTDCWAKNFDYGAANHRQIGTGPMLVLSDKSLIAPAKLTAWVETWRQNWRAVAGRYVQQRRTDGGRCLNGTGRETRQQRQQAETRDATHKPTEPVSRRQHTEPKQSAGSSERRTAGTRITCAPLMFKWPQAVHFLVQAGITLILPGPQTPKQRVGYTRLLPTKRPSSQDYPRNTLGRHTNDDNMTYTTHCSSNHPSPPRPTRRRENSETNDNTSSTARYRRQDKKRSREAREEKENRGREDEQTPTEDRYGSEQEREAMLVVK

SEQ ID NO: 60624 - protein, 306 aa, Homo sapiens
  DOMAIN (212)..(235): Heavy-metal-associated domain proteins domain identified by eMATRIX, accession number BL01047A, p-value=5.125e-17, raw score of 13.50
  DOMAIN (208)..(271): Heavy-metal-associated domain identified by PFam, accession name HMA, E-value=3.4e-19, PFam score of 72.3
MLDDYGGSLSELAREQLPAAEQAALAQLAARSLAPVPDDTGGAGMSNDTPFDALWQRMLARGWTPVSESRLDDWLTQAPDGVVLLSSDPKRTPEVSDNPVMIGELLREFPDYTWQVAIADLEQSGRIGDRFGVFRFPATLVFTGGNYRGVLNGIHPLAELINLMRWLVEPQQELHQPLTTVQNANDCCCDGACSSTPTLSENVSGTRYSWKVSGMDCAACARKVENAVRQLAGVNQVQVLFATEKLVVDADNDIRAQVESALQKAGYSLRDEQAAEEPQASRLKENLPLITLIDSSYFPHGTELAF

SEQ ID NO: 60625 - protein, 1113 aa, Homo sapiens; identical to SEQ ID NO: 56225
  DOMAIN (782)..(815): Bacterial extracellular solute-binding proteins family 3 sig. domain identified by eMATRIX, accession number BL01039B, p-value= 9.143e-09, raw score of 20.00
  DOMAIN (588)..(695): Bacterial extracellular solute-binding prot domain identified by PFam, accession name SBP_bac_5, E-value=7.9e-20, PFam score of 73.9

SEQ ID NO: 60626 - protein, 358 aa, Homo sapiens
  DOMAIN (41)..(96): Respiratory chain NADH dehydrogenase 49 Kd subunit proteins domain identified by eMATRIX, accession number BL00535A, p-value= 1.000e-40, raw score of 22.06
  DOMAIN (94)..(141): Nickel-dependent hydrogenases domain identified by PFam, accession name NiFeSe_Hases, E-value=2.8e-09, PFam score of 31.9
  misc_feature (1)...(358): Xaa = X or * as defined in Table 2
MDWLVFYLKKGRLCPEPTTDSETYPFINEGNSDARVIPVGPLHITSDEPGHFRLFVDGEQIVDADYRLFYVHRGMEKLAETRMGYNEVTFLSDRVCGICGFAHSVAYTNSVENALGIEVPQRAHTIRSILLEVERLHSHLLNLGLSCHFVGFDTGFMQFFRVREKSMTMAELLIGSRKTYGLNLIGGVRRDILKEQRLQTLKLVREMRADVSELVEMLLATPNIGNNALQGQLGISPNPEQEFRPRWNIWRPLEFNPLSPNTGNISKETWFNLLPAGRSVFLPGLNGSGVQEKNACEFRRGASAVGTFLWAPLFEKQNPFVPGQPGVVDDLNGIVDRAVLAAAGDADVASGAARLSAX

SEQ ID NO: 60627 - protein, 1164 aa, Homo sapiens
  DOMAIN (137)..(183): Respiratory chain NADH dehydrogenase 49 Kd subunit proteins domain identified by eMATRIX, accession number BL00535C, p-value= 8.250e-35, raw score of 22.70
  DOMAIN (932)..(987): Heavy-metal-associated domain identified by PFam, accession name HMA, E-value=3.5e-17, PFam score of 65.3
MPAAGARITRRWVPTGELLPPLPLAEVKRLLCAHVRELHDFYGPAKGYRIARKHVSWYLQEHAPNDQFRRTFNAIEDASEQLEALEAYFENFAHSVAYTNSVENALGIEVPQRAHTIRSILLEVERLHSHLLNLGLSCHFVGFDTGFMQFFRVREKSMTMAELLIGSRKTYGLNLIGGVRRDILKEQRLQTLKLVREMRADVATHPSDMAVAMRLLDAVVETITPEGKTRSITLADFYHPPGKTPHIETATCSSVDNFRMRLNEAVAKRFHLLAYFRIEMAKENTNGYRCQDLKVKAFKQRVIPINACTLRITAAAWLSSARVVKCWVKSRNERNPYPLLPAVRPGTQRRLPVINWRKAIRQPPVSTVKKGTPLPHSDELDAGNVLAVENLNIAFMQDQQKIAAVRNLSFSLQRGENAGNCWRIRLRGWANTRRGTYTIIPRGVFPPGKAPRGAPPGGTNLERKPKNQIEDTMRRFLTTLMILLVVLVAGLSALVLLVNPNDFRDYMVKQVAARSGYQLQLDGPLRWHVWPQLSILSGRMSLTAQGASQPLVRADNMRLDVALLPLLSHQLSVKQVMLKGAVIQLTPQTEAVRSEDAPVAPRDNTLPDLSDDRGWSFDISSLKVADSVLVFQHEDDEQVTIRNIRLQMEQDPQHRGSFEFSGRVNRDQRDLTISLNGTVDASDYPHDLTAAIEQINWQLQGADLPKQGIQGQGSFQAQWQESHKRLSFNQISLTANDSTLSGQAQVTLTEKPEWQLRLQFPQLNLDNLIPLNETANGENGAAQQGQSQSTLPRPVISSRIDEPAYQGLQGFTADILLQASNVRWRWNEFYRCATQMTNSRGPAKPPLWTVSRFVVTRYPVVPEPLFRQSDDARVLLASTTGAAGSGCAVTGDYLDAPGRVPLAYLHVYRHDAGDGVAGSTPTLSENVSGTRYSWKVSGMDCAACARKVENAVRQLAGVNQVQVLFATEKLVVDADNDIRAQALRLIKSGSYFAIETLMSVAAIGALFIGATAEAAMVLLLFLIGERLEGWAASRARQGVSALMALKPETATRLRKGEREEYQATGGTLSSIDHACHSHAQVLGTRSGRYHPYLDEYLIQRWRVIEDIVAIRLLLPAVMAWWWECSGRGMNNGVNNKHVTIIDHSLLIDDDIYVLYTRPMRDSSQ

SEQ ID NO: 60628 - protein, 219 aa, Homo sapiens
  DOMAIN (70)..(89): GLYCOSYL HYDROLASE FAMILY 3 SIGNATURE domain identified by eMATRIX, accession number PR00133E, p-value=1.250e-17, raw score of 14.30
  DOMAIN (1)..(132): Glycosyl hydrolase family 3 N terminal domain identified by PFam, accession name Glyco_hydro_3, E-value=0.0011, PFam score of - 72.0
MPSVNHFPASGAVKAGKESTPVNMSPQRLFNDYMPPYKAGLDAGSGAVMVALNSLNGTPATSDSWLLKDVLRDQWGFKGITVSDHGAIKELIKHGTAADPEDAVRVALKSGIYMSMSDEYYSKYLPGLIKSGKVTMAELDDAARHVLNVKYDMGLFNDPCSHLGPKESDPVDTNAESRLLRKEAREVARESLVLMKNRLETLPLKHPPHHCGGWATGGQ

SEQ ID NO: 60629 - protein, 708 aa, Homo sapiens; identical to SEQ ID NO: 48559
  DOMAIN (170)..(186): Putative AMP-binding domain proteins domain identified by eMATRIX, accession number BL00455, p-value=8.500e-11, raw score of 13.31
  DOMAIN (382)..(654): HlyD family secretion protein domain identified by PFam, accession name HlyD, E-value=4.7e-48, PFam score of 173.1

SEQ ID NO: 60630 - protein, 1044 aa, Homo sapiens
  DOMAIN (159)..(177): URIDINE KINASE SIGNATURE domain identified by eMATRIX, accession number PR00988A, p-value=2.853e-10, raw score of 6.39
MHVRLNVHDSHLRYAASTCTASYPCLEHNRWSVALDCHLNCTSEPQLLLCGSMLCICVSFCVLHHIPAYHTAYTMTVCHCRIRDRLSAWLADARYFQHLHSMCGDTIRGSPNWLISAQRQALVWVNSDGHDDERDVGIGRLLRGRMPALVFLALDGPDDALIAVIGSDGSGKSTVCDILLPWSKNMVLPKEFIRKTGRKCRSCSDKITVMGKSLHKTIERNQLLLRVTLEDPCTCNGMHKYFNHGIPVGIANFKCRYALWPVGRRVVSVEQRKLRVKPMHRLHFARRSGSTYATIAFGALLIAIYTMWEHHCMSTGISSRCICCRCRLVQRPDTYWSSAVPVRPLQDNLARCYEQLGVILSSSRACLILILKIKPGTAVRFGSRQRSADATLNQTKLSLLTRLRGVVVNGERVARCIITLSQGYSRACQLFSYSVSNIREHFRHSDVLFRFQRLSRCRARRASNCHAVFCCHRDSLAAINADSPGLSCNAENLSTTLHRLRRRTKCGTLLANGGFFITKHGDDRHYHRVSRFMREQSKPVTIVGRNRKRAAAFPAFAAGLRISAGDFQRFSAFRWHHRHTETDPAHYNDYYYSVRRSVEICQLHNRHATCARSRRLITTHEFARIAGRLSCRRNGFLAADPSATLCFPLIENIRLTLPRWCHPQSACGAGADRRRKPGAACLAEMLQRVHITVQGREQSQINRAGEKIPAEEHPQPAAAPPAGDLRRTGEHEDELMGDKSCAYLVVKDRCARCRYNRSHPARYLPDNVAARFATHQQGREVVTPALPPSGWCLVLRGSRRNHRIDPLLQRFCAQIRPHGKAAIITSVEYPAGGLLPCQHHRRRSADGYSADQIRRHPWNTCTDPPVNFNSLLRRRRNRYRARVRIRITIELGTGSIEPFTPRLYGRRPYPLETMLRIHCCSIDHQSLAGRSGVMMTQGTLVDATIIEDPARPRTKSSNAIRRCIDQERQSVALWHEGPHWVDAKSGLTHSLVTTAATSMTSISWVICCMERSNCLSRCRLPRGATARGAAEVDVDWLIAERPGK

SEQ ID NO: 60631 - protein, 111 aa, Homo sapiens
VLKWGLNNARLLAGYSRHSGICHLRRFVSRKIAYGPFWCSGTGRGNRSRRRDNSRHGAGSRPGFWVKDPTDLVVAMVTSMLTIVLVFDFLGKLNGDLLESPKQAFKPEWLC

SEQ ID NO: 60632 - protein, 1013 aa, Homo sapiens
  DOMAIN (579)..(596): Domain of Unknown Function 2 domain identified by eMATRIX, accession number PF00563B, p-value=3.057e-17, raw score of 8.97
  DOMAIN (626)..(902): 5'-nucleotidase domain identified by PFam, accession name 5_nucleotidase, E-value=3.6e-128, PFam score of 439.2
MKPLHYTASALALGLALMGNAQPVTTIPFWHSMEGELGKEVDSLAQRFYAENPDYKIVPTYKGNYEQNLSAGIAAFRTGNAPAILQVYEVGTATMMASKAIKPVYDVFKEAGIQFDESQFVPTVSGYYSDSKTGHLLSQPFNSSTPVLYYNKDAFKKAGLDPEQPPKTWQDLADYAAKLKASGMKCGYASGWQGWIQLENFSAWNGLPFASKNNGFDGTDAVLEFNKPEQVKHIAMLEEMNKKGDFSYVEDALVEKAKQVTWRLLAAGVCLLTVSSVARADSLDEQRSRYAQIKQAWDNRQMDVVEQMMPGLKDYPLYPYLEYRQITDDLMNQPAVTVTNFVRANPTLPPARTLQSRFVNELARREDWRGLLAFSPEKPGTTEAQCNYYYAKWNTGQSEEAWQGAKELWLTGKSQPNACDKLFSVWRASGKQDPLAYLERIRLAMKAGNTGLVTVLAGQMPADYQTIASAIISLANNPNTVLTFARTTGANDFTRQMAAVAFASVARQDAENARLMIPSLAQAQQLNEDQIQELRDIVAWRLMGNDVTDEQANWRDDAIMRSQSTSLIERRVYQHNITFALDDFGTGYATYRYLQAFPVDFIKNRFSATLLATLIAASVNAATVDLRIMETTDLHSNMMDFDYYKDTATEKFGLVRTASLINDARNEVKNSVLVDNGDLIQGSPLADYMSAKGLKAGDIHPVYKALNTLDYTVGTLGNHEFNYGLDYLKNALAGAKFPYVNANVIDARTKQPMFTPYLIKDTEVVDKDGKKQTLKIGYIGVVPPQIMGWDKANLSGKVTVNDITETVRKYVPEMREKGADVVVVLAHSGLSADPYKVMAENSVYYLSEIPGVNAIMFGHAHAVFPGKDFADIEGADIAKGTLNGVPAVMPGMWGDHLGVVDLPLSYAPRSMAATQAKARARTLSAFALSTPSRRKPPAAYTSPPIPSPTQMPQHTRHSPHFNQHPHNTTHTTTTPITLSPSKHRHHNTNHPPHLHHTTSMKQPSLGRLTRTPY

SEQ ID NO: 60633 - protein, 474 aa, Homo sapiens
  DOMAIN (136)..(151): N12 CLASS N6 ADENINE-SPECIFIC DNA METHYLTRANSFERASE SIGNATURE domain identified by eMATRIX, accession number PR00507B, p-value= 1.849e-10, raw score of 14.16
MLPLGECKVYSDLDLYLGVQAINWTEMFNPGATFAVHFSGLNDTIRNSQYGAMKVKDAIVDAFTRKNLPRPNVDRDAPDIRVNVWLHKETASIALDLSGDGLHLRGYRDRAGIAPIKETLAAAIVMRSGWQPGTPLLDPMCGSGTLLIEAAMLATDRAPGLHRGRWGFSGWAQHDEAIWQEVKAEAQTRARKGLAEYSSHFYGSDSDARVIQRARTNARLAGIGELITFEVKDVAQLTNPLPKGPYGTVLSNPPYGERLDSEPALIALHSLLGRIMKNQFGGWNLSLFSASPDLLSCLQLRADKQYKAKNGPLDCVQKNYHVAESTPDSKPAMVAEDYTNRLRKNLKKFEKWARQKGLIGRIRGKGTRPRRPGIETRLRNIRHFSISALQKSLKWTDAQTCRPCKHPSRLVRSPAPGGQAQAKCAMPSNQCTGARFGKLQCRIPHQRSIAEDPHRSLIRSTSQRRRQRSRPLFC

SEQ ID NO: 60634 - protein, 616 aa, Homo sapiens
  DOMAIN (161)..(191): Glutathione S-transferases domain identified by eMATRIX, accession number PF00043, p-value=2.333e-14, raw score of 21.83
  DOMAIN (114)..(278): Glutathione S-transferases domain identified by PFam, accession name GST, E-value=9.5e-43, PFam score of 144.0
MALNVLGKQFDKLLNVTLCYPDNNRQPFFDMLSGKLTRIVVHVDLQPIADELHGDYINDKSFKRHFQQWLNSLWQEKDRLLTSLMSSQRQNNSKNSDYTWRFSWRVAANKRSVMTLFSGPTDIYSHQVRIVLAEKGVSFEIEHVEKDNPPQDLIDLNPNQSVPTLVDRELTLWESRIIMEYLDERFPHPPLMPVYPVARGESRLYMHRIEKDWYTLMNTIINGSASEADAARKQLREELLAIAPVFGQKPYFLSDEFSLVDCYLAPLLWRLPQLGIEFSGPGAILTRLTPRRPYLLRAFYEWLLDNQLTPHLVVDVTLPGVQVPMEYARDGQIVLNIAPRAVGNLELANDEVRFNARFGGIPRQVSVPLAAVLAIYAQSTCRHASLALAVVLQRRDWENPGVTQLNRLAAHPPFASWRNSEEARTDRPSQQLRSLNGEWRLMRQYKSATLNTGQPHVRARELVDSDTLASDAARLTCRHGLGNQIITRCINTAKLPKSVVALFSHPGELSARSGDALQKAFTDKEELLKQQASNLHEQKKAGVIFEAEEVITLLTSVLKTSSASRTSLSSRHQFAPGATVLYKGDKMVLNLDRSRVPTECIEKIEAILKELEKPAP

SEQ ID NO: 60635 - protein, 472 aa, Homo sapiens
  DOMAIN (103)..(128): Prokaryotic transglycosylases proteins domain identified by eMATRIX, accession number BL00922A, p-value=3.143e-19, raw score of 18.42
  DOMAIN (277)..(472): ABC transporter domain identified by PFam, accession name ABC_tran, E-value=1.6e-41, PFam score of 151.4
MPYSGAEKWPRVPKFNARDSKIIPRVASGPILLKNKSKPDRAHLPGYASTTQWWILSVQPRFAGNLGDHLKERFPLANNDLSKRYTSGKKIPQSYAMAIARQKSAWNPKVKSPVGASGLMQIMPGTATHTVKMFSIPGYSSPGQLLDPETNINIGTSYLQYVYQQFGNNRIFSSAAYNAGPGRVRTWLGNSAGRIDAVAFVESIPFSETRGYVKNVLAYDAYYRYFMGDKPTLMSATEWGQAKSNVAQFVYTMHRVGKVVPPKRHILKNISLSFFPGAKIGVLGLNGAGKSTLLRIMAGIDKDIEGEARPQPDIKIGYLPQEPQLNPEHTVRESIEEAVSEVVNALKRLDEVYALYADPDADFDKLAAEQGRLEEIIQAHDGHNLNVQLERAADALRLPDWDAKIANLSGGERRRVALCRLLLEKPDMLLLDEPTNHLDAESVAWLERFLHDFEGTVVAITHGGSSRVDCRQ

SEQ ID NO: 60636 - protein, 479 aa, Homo sapiens
  DOMAIN (376)..(413): Topoisomerase DNA binding C4 zinc fing domain identified by PFam, accession name zf-C4_Topoisom, E-value=5.7e-14, PFam score of 59.8
  misc_feature (1)...(479): Xaa = X or * as defined in Table 2
XVIDLWSRAVIGWSMSPRMTAQLACDALQMALWRRKKPRNVIVHTDRGGQFGDRWKGWLTRSIFRWISFQPALAPTRKAALCYLAREVNPDMADYIKKLKLPGIHVREESRRYYPSGEVTAHLIGFTNVDSQGIEGVEKSFDKWLTGQPGERIVRKDRYGRVIEDISSTDSQAAHNLALSIDERLQALVYRELNNAVAFNKAESGSAVLVDVNTGEVLAMANSPSYNPNNLSGTPKEAMRNRTITDVFEPGSTVKPMVVMTALQRGVVRENSVLNTIPYRINGHEIKDVARITTEEDFNHAKRCKTTINLVPENEVLNVLEGENAETNALRAKRSCPKCGTAMDRYLIDPKRNNPTCDGYQIEQGEFRIKGYDGPIVECEKCGSEMHLKMGRFGKYMACTNEECKNTRKILRNGEVAPPKEDPVPLPELPCEKSDAYFVLRDGAAVAARFNDDRHRRGLAVLYADQADLYGVADSVSAX

SEQ ID NO: 60637 - protein, 597 aa, Homo sapiens; identical to SEQ ID NO: 45226
  DOMAIN (63)..(103): AMINOTRANSFERASE PROTEIN AMIDOTRA domain identified by eMATRIX, accession number PD00718D, p-value=4.857e-21, raw score of 29.33
  DOMAIN (144)..(261): CBS domain identified by PFam, accession name CBS, E-value=5e -11, PFam score of 50.1

SEQ ID NO: 60638 - protein, 1084 aa, Homo sapiens; identical to SEQ ID NO: 46101

SEQ ID NO: 60639 - protein, 314 aa, Homo sapiens
  DOMAIN (237)..(280): Gamma-glutamyltranspeptidase proteins domain identified by eMATRIX, accession number BL00462A, p-value=1.545e-33, raw score of 20.89
MVALAARELWAGMTPPLLSSFEIDALEAAQQAAPELPRGLLLDEWRDDWRELTARLGCVSIHLNHKLLNKARVMQLKDAGLRILVYTVNKPQRAAELLRWGVDCICTDAIDVIAYAADSTNYPDYGCCLTSRRWCWAAFAAGRDFAPPAVTATPAENYCLSGFLNAAVATEFAFSVADSASLFAGFAESASGFASAAGWVSDTPAGSCFSAAAAPPAPPVSYGVEEDVFHPVRAKQGMVASVDATATQVGVDILKEGGNAVDAAVAVGYALAVTHPQAGNLGGGGFMLIRSKNGIPRLSISAKWNLQATRICPR

SEQ ID NO: 60640 - protein, 2478 aa, Homo sapiens
  DOMAIN (824)..(843): CARBAMOYL-PHOSPHATE SYNTHASE PROTEIN CPSASE DOMAIN SIGNATURE domain identified by eMATRIX, accession number PR00098G, p-value= 7.188e-21, raw score of 7.22
  DOMAIN (757)..(1097): Carbamoyl-phosphate synthase (CPSase) domain identified by PFam, accession name CPSase_L_chain, E-value=5.9e-68, PFam score of 239.2
MNIDETLIEAAITDKTRVIVPVHYAGVACEMDTIMALAKKHNLFVVEDAAQVADMRAVPCLHALTGGGRGQQPTDVHTAELYYSLAEGERSKQAAETATVGRERWNTPLSKSHTHIPMIWYTVRRRQKLSGAQSLTERYDKTIACQFKRGLHDFVQRHGAVFIQRQREPLRTRFRLRMRYRQRVAPAHAASTAFTALLENIHPHLSGSGVHRRYHSLFRAYRRVNLKDIFRGGYAMKRLLILTALLPFVGFAQPINTLNNPNQPGYQIPSQQRMQTQMQTQQIQQKGMLNQQLKTQTQLQQQHLENQINNNSQRVLQSQPGERNPARQQMLPNTNGGMLNSNRNPDSSLNQQHMLPERRNGDMLNQPSTPQPDIPLKTIGPNKPRGSSGAACCAASKASISNDDSSGGVIPAHSSRAASATILPVNGPVPVVGLISIFAIIPCSRQRSATCESNGSGSPLNILLYQLPASTRSKSCQFSSPATPQPLLRAGGSICAGRQGDLPPLKVMPVPTKTFGVHIRVSPYCLPSNDLRLGCPRLQPRDAFCDRLKVHPTHADAVRRSLIQIWMFRTAGRTPGRPDVKQYWFALSQHIRLIKLPRIVHDSRRNFGTGLPMSADSRLVGSSPSALRASCHSSAAAIARKIINGINNTLRFIRPPAQFFADSRAYDSEDQTDTAVRPTPSSARPPKSSEQMLFTEGRVQVTRDAAVNCRFGHHRPGSVVITFFRIQHRFRLAIARYADSRHTATPVRASHLFDITEATGFPIAKVAAKLAVGYTLDELMNDITGGRTPASFEPSIDYVVTKIPRFNFEKFAGANDRLTTQMKSVGEVMAIGRTQQESLQKALRGLEVGATGFDPKVSLDDPEALTKIRRELKDAGADRIWYIADAFRAGLSVDGVFNLTNIDRWFLVQIEELVRLEEKVAEVGITGLNADFLRQLKRKGFADARLAKLAGVREAEIQFATDTAYMYSTYEEECEANPSTDREKIMVLGGGPNRIGQGIEFDYCCVHASLALREDGYETIMVNCNPETVSTDYDTSDRLYFEPVTLEDVLEIVRIEKPKGVIVQYGAAGVPVIGTSPDAIDRAEDRERFQHAVERLKLTQPANATVTAIEMARREGRTRLATRWWSRPSYVLRGRAMAIVYDEADLRRYFQTAVTVYTMRRVPHPSSIRGAVTICHSSLVSELPFASSGIFFSSQFLKCSRAVRALVPVAHTALCLASCHTVRRLYPFTSFNRKPLWSPRVQQHRLGGYKHQTEVFTVIAPIKTRGTTCDVQLLASERWLPRRTTVAGNIGKRLDPKTRAAVTNGTTRISAGRWPRSRNQGGRKALRRDTQIPGTAGVCSGVTYPEETESARERWPRFTNGPDGEVIAIDVNDEQLKLAPEMGADLAINSHTEDAAKIVQKTYGGLFRLEVVCTAVVGYGAWVFRGAIAAPACYHPPVLVARGHAGRKLTAEMARNYDLILAMESEHIAQVTAIAPEVRGKTMLFGQWLEQKEIPDPYRKSQDAFEHVYAVHSHSLAGVLALSSLFSSPAGRSLGRSSPKAVSAVPPDVPPVPFARWSPRGITMSVAMPTVASGLTTHRQGYLYSPIDPQTNKPWPAMPQSFHNLCQRAATAAGYPDFQPDACLINRYAPGAKLSLHQDKDEPDLRAPIVSVSLGLPAIFQFGGLKRNDPLKRLLLEHGDVVVWGGESRLFYHGIQPLKAGFHPLTIDCRYNLTFRQAGAYDDRIWTRSIVAWPGVRHLDGDDFSPVITQAQQMPGFPYSEIPHLITVDFVRQTLLGAANTLIRSEKLGCGVNDLPLSLVLSWFEQKAIVILLTLLSLGVKNIVTGPTAPGFLTPDLLAVLNEKFGLRSITTVEEDMKQLLSASLSMTMPTNQCPWRMQVHHITQETPDVWTISLICHDYYPYRAGQYALVSVRNSAETLRAYTISSTPGVSEYITLTVRRIDDGVGSQWLTRDVKRGDYLWLSDAMGEFTCDDKAEDKFLLLAAGCGVTPIMSMRRWLAKNRRDPLESPTAGTPLARPCASQLTVLTPGTHFCADLSRNMTNSKGHRQNGQTERQRHAGKTDAYSGSLSHDVPVKPVQELWYSAKAEYLAGARYAANNINHILEEASQATQTAVNIAGKECNLEEQYQLGTEAALKPHLRTIIILKQGIVWCTSLPGNRVLLSRIPVFPDSNLLLAPAIDTVNRLPILLYQNQFADTRILVTISDQHIRGALNVPLKGVRYVLRVADDIIGPTGDVMTLNGHYPYTEKFMDVTCGTPPCVITSAFRSIEPELTVYTCLKKIEASFELIEENGDPKITSEIQLLKASGILQSLYSVGFVGIRDKNTSSYSFCHDGRTPDKGFESNEKLLIHPCYWLGLNLNRNALAPEEAEEINDEYDINIISDNSAIRNKTIGQITTHLDQIPIGNEGATEFEQWCLDALRIVFASHLTDIKSHPNGNAVQRRDIIGTNGGKSDFWKRVLEDYKTDKLFLMLKILKN

SEQ ID NO: 60641 - protein, 313 aa, Homo sapiens
  DOMAIN (178)..(214): PTR2 family proton/oligopeptide symporters proteins domain identified by eMATRIX, accession number BL01022E, p-value=9.438e- 21, raw score of 23.51
  DOMAIN (24)..(222): POT family domain identified by PFam, accession name PTR2, E- value=2.2e-51, PFam score of 175.2
MDYPTTQIVVAKEQHQCRRLIHIGYSVTYNLCGAGLIIALLVYIAMFVEWHSSWIKPRRNKMFVAFVLMLEAVVFYILYAQMPTSLNFFAINNVHHEILGFSINPVSFQALNPFWVVLASPILAGIYTHLGNKGKDLSMPMKFTLGMFMCSLGFLTAAAAGMWFADAQGLTSPWFIVLVYLFQSLGELFISALGLAMIAALVPQHLMGFILGMWFLTQAAAFLLGGYVATFTAVPDNITDPLETLPVYTNVFVLHWRTCIDIKAMPFSDYRVWRGDIRQRWRVVRALYHHAFVASKRAGSSNPSASRSGPTSD

SEQ ID NO: 60642 - protein, 437 aa, Homo sapiens
  DOMAIN (40)..(64): PTR2 family proton/oligopeptide symporters proteins domain identified by eMATRIX, accession number BL01022C, p-value=7.158e- 17, raw score of 16.62
  DOMAIN (10)..(321): POT family domain identified by PFam, accession name PTR2, E- value=4.9e-96, PFam score of 325.1
MSANHLLGTKRTIVLGALVLAIGYFMTGMSILKPVLIFIALGTIAVGTGLFKANPARLLSKCYPPKDPRLDGAFTLFYMSINIGSLIALSLAPVIADRFGYSVTYNLCGAGLIIALLVYIACRGMVKDIGSEPDFRPMSFSKLLYVLLGSVVMIFVCAWLMHNVEVANLVLIVLSIVVTIIFFRQAFKLDKTGRNKMFVAFVLMLEAVVFYILYAQMPTSLNFFAINNVHHEILGFSINPVSFQALNPFWVVLASPILAGIYTHLGNKGKDLSMPMKFTLGMFMCSLGFLTAAAAGMWFADAQGLTSPWFIVLVYLFQSLAFDGLYSRDVVLTQLRVLLAHVHITGAEHTIVKVPLPRLEMSYRAEKVGTAPEDAQRSNHEHKPTRGGTTKQRETTAGPVFIDSFSHLQNGIDITLLLCGGARETTEGFAKLQKLKA

SEQ ID NO: 60643 - protein, 571 aa, Homo sapiens
MSTIASFTQFENSTTGHHFTAVTNKRRDDVFQVHDLRLTMVQCHHVDTERNLQLGLGVEVVEHNFTDRIAFHFNHDAHTVFVRLVTQRADAFHAFFFYQFRNLLDQARFCYLIRNFVDDNGFTTGFGRQLSLFAPSAGYTPLPATRTGKLFSIPPTTVKDLPPPGKIPPPGMFSFNPFKGEGLDGQTLNLRVIGGDYHYTAAGQLAQHEDTSTVQLSGDLFSGRWGTDGEWMLGIVGGYSDNQGDSRSNMTGTRADNQNHGYAVGLTSSWFQHGNQKQGAWLDSWLQYAWFSNDVSEQEDGTDHYHSSGIIASLEAGYQWLPGRAAFRPPPGAQGSKALKTAMTGSSWVVTTNTLRNLSNSMSSLERRVFSLYINLFRPLLKKHCWELTSDFATSLNKSWLLKAKEATNSGPYTECSSHHADRIRCPVQIICASDDLLVPTACSSELHAALPDSQKMVMPYGGHACNVTDPETFNALLLNGLASLLHHREAALDPGVGARILGAKQWPQDSGGAFFPSAFPKRPPPTDNRDQVDAAAIKGLLAHNAESGAGEPPRRGKGRQSVMRGLRSGN

SEQ ID NO: 60644 - protein, 289 aa, Homo sapiens
MSWNYKQPHEPQSDEVAKENNGYALEDLYDANGVLIAKKGKPVLPSNWNRNNMRTSQYLLSTLKETPADAEVISHQLMLRAGMIRKLASGLYTWLPTGVRVLKKVENIVREEMNNAGAIEVSMLEDGQCAADGLTADFLRAACADKAHHQRGDNWYEARTAEECQRIRQADIMETLMQHPDDNTGDHRTEDPGIDRLDPKNALDVIGFQNRGIRGWQNAFIGQPEVYREVHYRITDEASECRYAFIFACQAQRDGDTEHDRQETKSCRYLFPASPSPSPLAPWRSRPGY

SEQ ID NO: 60645 - protein, 207 aa, Homo sapiens; identical to SEQ ID NO: 48548
  DOMAIN (157)..(170): PROTEIN PRECURSOR SIGNAL HYDROLA domain identified by eMATRIX, accession number PD00469A, p-value=7.980e-11, raw score of 13.95
  DOMAIN (157)..(198): Putative peptidoglycan binding domain identified by PFam, accession name PG_binding_2, E-value=8.2e-12, PFam score of 52.7

SEQ ID NO: 60646 - protein, 870 aa, Homo sapiens
  DOMAIN (751)..(787): Nitroreductase family domain identified by eMATRIX, accession number PF00881A, p-value=3.192e-11, raw score of 27.15
LLILVGIGLSFFVPFAPKSWPAAIDWHTIITLSGLMLLTKGVELSGYFDVLGRKMVRRFATERRLAMFMVLAAALLSTFLTNDVALFIVVPLTITLKRLCEIPVNRLIIFEALAVNAGSLLTPIGNPQNILIWGRSGLSFAGFIAQMAPLAGAMMLTLLLLCWRCNTIRGCKHRSGNRGWCGVVWGLYIVFLTALEFKQELWGLVIVAAGFALLARRVVLSVDWTLLLVFMAMFIDRCKACWRNETPADAEVISHQLMLRAGMIRKLASGLYTWLPTGVRVLKKVENIVREEMNNAGAIEVSMPVVQPADLWQESGRWEQYGPELLRFVDRGERPFVLGPTHEEVITDLIRNELSSYKQLPLNFYQIQTKESLQETYDAMYAAYSKIFSRMGLDFRAVQADTGSIGGSASHEFQVLAQSGEDDVVFSDTSDYAANIELAEAIAPKEPRAAATQEMTLVDTSVPTWLAIDAVVFQPRVKEQGSPTIYKATVNVADLDRNQFLDASLTLARHPSETQERMMLRLLAWLKYADERLQFTRGLCADDEPEAWLRNDHLGIDLWIELGLPDERRIKKACTQAAEVALFTYNSRAAQIWWQQNQSKCVQFANLSVWYLDDEQLAKVSAFADRTMTLQATIHDGVIWLSDDKNNLELSAVNSVDPPVQIICASDDLLVPTACSSELHAALPDSQKMVMPYGGHACNVTDPETFNALLLNGLASLLHHRIAMNEAVSPGALSTLFTDARTHNGWRETPVSDETLREIYALMKWGPTSANCSPARIVFTRTAEGKERLRPALSSGNLQKTLTAPVTAIVAWDSEFYERLPLLFPHGDARSWFTSSPQLAEETAFRNSSMQAGYLIVACRALGRRPASFL

SEQ ID NO: 60647 - protein, 267 aa, Homo sapiens
MVISCRHSASVESPAKNPTSTPVFRNNTRGKCRNHPRTAILVTTSVPDLRSTVPSRLILLTPPCKKTTPPNGHRTAGPFGDQLFNRQVGKFWQASSAALALFTVLCRNTYIYPPKPSMRIMPTSSPGVPDNMPRSNTSVSAVTTWVKRVPTACTGLVCLPISQHALPATPSHHPGRIRTLPHRRSTGGSYYIESLTDQIVKQAKLLSNRSTKPVAWRKRSSRSGKTNDRRGLSARTSLIDQGKRVIVGVNKYNWIPKTKPMYLRSTT

SEQ ID NO: 60648 - protein, 476 aa, Homo sapiens
  DOMAIN (142)..(189): Methylmalonyl-CoA mutase proteins domain identified by eMATRIX, accession number BL00544C, p-value=1.000e-40, raw score of 21.04
  DOMAIN (1)..(375): Methylmalonyl-CoA mutase domain identified by PFam, accession name MM_CoA_mutase, E-value=8.1e-143, PFam score of 487.9
  misc_feature (1)...(476): Xaa = X or * as defined in Table 2
MPRRPGYQYGVISSRESKSSTAATLILTHHNRQCALSPTSSPGVPATCRDLIPSVSAVTTWLKRVPNCVQQVAFTLADGIEYIKAAISAGLKIDDFAPRLSFFFGIGMDLFMNVAMLRAARYLWSEAVSGFGAQDPKSLALRTHCQTSGWSLTEQDPYNNVIRTTIEALAATLGGTQSLHTNVFDEALGLPTDFSARIARNTQIIIQEESELCRTVDPLAGSYYIESLTDQIVKQARAIIQQIDEAGGMAKAIEAGLPKRMIEEASAREQSLIDQGKRVIVGVNKYKLDHEDETDVLEIDNVMVRNEQIASLERIRATRDDAAVTAALNALTHAAQHNENLLAAAVNAARVRATLGEISDALEVAFDRYLVPSQCVTGVIAQSYHQSEKSASEFDAIVAQTSGTELMSSWLTSPPSRATDDRHHFTFADAETDIVQHIGLHTAFLIAFAQVVALQQDLIHNVKPQRVEWRQRAMKX

SEQ ID NO: 60649 - protein, 243 aa, Homo sapiens
  misc_feature (1)...(243): Xaa = X or * as defined in Table 2
MXSEVDSRLVSHQDGKWQVSHGPFESYDHLGETNWSLLVQAVNHWHEPTAALMRPFRELPDWRIDDLMISFSVPGGGVGPHLDQYDVFIIQGTGRRRWRVGEKLQMKQHCPHPDLLQVDPFEAIIDEELEPGDILYIPPGFPHEGYALENAMNYSVGFRAPNTRELISGFADYVLQRELGGNYYSDPDVPPRAHPADVLPQEMDKLREMMLELINQPEHFKQWFGEFISQSRHELDIAPPEPP

SEQ ID NO: 60650 - protein, 145 aa, Homo sapiens
SWTSRIVPLLFAIGISGYLISTADVNRSAFLAGQWFIRKINGRRKKSSVSSMVSCISISAPSPGSGGHCGCSVYELYVLISFAVVAATFDNRKPANVRICAHILRNPVKYPNGIGIFIGGASHSGRRIPFWRDLIHRSDMDRITK

SEQ ID NO: 60651 - protein, 237 aa, Homo sapiens
  DOMAIN (9)..(30): FATTY ACID DESATURASE FAMILY 1 SIGNATURE domain identified by eMATRIX, accession number PR00075A, p-value=9.565e-09, raw score of 16.97
MAFGLGAIWGVLILTCLLPVNQLLTALPVDVLGSLGELSSPVVSAFALFPLVAIFYQFGWKQSLIAAVVVLMTRVVVVRYFPHLNPESIEIFIGMVMLLGIAITHDLRHRDENDIDASGLSVFEERTSRIIKNLPYIAIVGALIAAVASMKIFAGSEVSIFTLEKAYSAGVTPEQSQTLINQAALAEFMRGLGFVPLIATTALATGVYAVAGFTFVYAVDYLSPNPMVAAVLGAVVI

SEQ ID NO: 60652 - protein, 390 aa, Homo sapiens
  misc_feature (1)...(390): Xaa = X or * as defined in Table 2
XILSRMYGNLPIEYGADGAGSGNCGTPCRVTPTERRMEVYSISIWMMTPCVFHMMGSARNASYCDGITSRRLYLIWGMVGENQVFDDMDQWPLKICASCGHKRIRYVMILSAFSLEGKVAVVMVVILDWKVVNVDFVMLTEYAADSKLRLLTHPLPWLTPSGVDGEKRQNSVAYFRNRKYAHKSRQRRRSHSDQLTESGYLDLQPEMSSAELTEKLVGPSRAANTTPSSVTIRTRHDDQVLTQLIVVWKLPARIWSLKKLHYSRPNSGGATRHRKTILSNTGDDLDVIGVAFDAAWLVSTYCSFVRAKCSQPQLFPESAWRYGTERVVETFVGQFYLQGSQMRPYRNWRDARLMFNQTRGDRARYLKLARTNAATALTSKLSQQSTVHRD

SEQ ID NO: 60653 - protein, 181 aa, Homo sapiens
  DOMAIN (90)..(129): 'Homeobox' antennapedia-type protein domain identified by eMATRIX, accession number BL00032B, p-value=7.545e-13, raw score of 10.83
  DOMAIN (87)..(131): Homeobox domain identified by PFam, accession name homeobox, E-value=1.7e-13, PFam score of 58.3
MGPNVSGNPVIKYFNYLYTYKMPGDIKNWVDAHMNCEDIAMNFLVANVTGKAVIKEAGVKKPQDRSSSDLPSPLEKADSESNKGKKRRNRTTFTSYQLEELEKVFQKTHYPDVYAREQLAMRTDLTEARVQAVIRQRAGNARKETNRAQVDVLVEFTTKFQQRTPQRNMVRNGIRPPTAPK

SEQ ID NO: 60654 - protein, 333 aa, Homo sapiens
  DOMAIN (209)..(231): PYRIDINE NUCLEOTIDE DISULPHIDE REDUCTASE CLASS-II SIGNATURE domain identified by eMATRIX, accession number PR00469H, p-value= 8.560e-20, raw score of 17.97
  DOMAIN (21)..(231): Pyridine nucleotide-disulphide oxidoreducta domain identified by PFam, accession name pyr_redox, E-value=3.5e-16, PFam score of 57.4
MSALITSSTPALGGRSLPLCAGPAGYTAAVYAARANLQPVLITGMEKGGQLTTTTEVENWPGDPNDLTGPLLMERMHEHATKFETEIIFDHINKKPLKAVGVSACATCDGFFYRNQKSSGHRPAAIPRVKEALYLSNIASEVHLIHRRDGFRAEKILIKRLMDKVENGNIILHTNRTLEEVTGDQMGVTGVRLRDTQNSDNIESLDVAGLFVAIGHSPNTAIFEGQLELETILRNPRPSPKFKNGLSCFPGKIVTVPFPTNINRKIKDSLKAAPKSQKADSPSIDYAELLQHFEKVQNKHLEVRHQRSGRGDHLDRRVVLTGLARRRAHRVVP

SEQ ID NO: 60655 - protein, 1390 aa, Homo sapiens; identical to SEQ ID NO: 31515
  DOMAIN (1346)..(1385): tRNA synthetases class II domain identified by eMATRIX, accession number PF00152D, p-value=5.875e-34, raw score of 21.30
  DOMAIN (53)..(445): Phosphoenolpyruvate carboxykinase domain identified by PFam, accession name PEPCK_ATP, E-value=1.4e-114, PFam score of 394.1

SEQ ID NO: 60656 - protein, 1495 aa, Homo sapiens
  DOMAIN (396)..(411): MU OPIOID RECEPTOR SIGNATURE domain identified by eMATRIX, accession number PR00537C, p-value=5.091e-09, raw score of 7.38
MAVAAAALSLLLLLLILSRTNEFDLRVFIQPQHDSGEDTYPYWSQIIVTIIITWDQMAPTSKGYHEQSMISYASPEKAIRQLNQSYNVGKGPDYPAGKEGLHHIKAENRLSNAVTSATSPPLKKLPLARTANVDVAEYRRDCGSRFRSYAIFTGHFFHFIARHPTPPWRTNWRCNWFCRRSPARKAAALAKASVNKVFFIQPTPQFVIGQTEAAGIRIISQLPLRTHIPGYGAAAFAQPGRRAIAMTINREPQRGRQGDDFTQAHSAIADSHQFATGDGDKSVQTSRSAWSSSTMPRLTLRRSGRHRWQPAGARRIGRKMRVFAITGASFSPSPAEYQPLLPSLDYRQSRVINTDGVAAVWSYYGALVVAKERGGIVSVWNWLGTRATERDGKRDCGSARTKLATRHSYCARHGREHGHHGIVSDGLVRFSLYIFSGIILGCCHPSSYWSTSQACTAWLFRCGKVCSLAARITRVMPAGPVFSDAESRIAAATDHHLDICGGGTTRSEMAASGDSALPDRTTIMNFATCWSSINWPANCSRPQSLAGRSRRHDDSRHLVDATIIEAPSSTKNKEHNAIRRCIRPRKAISGTWHEGPHWCRCQEWPDPRLVTTAANEHDFNQLGNCCMERSNLSQPMPATKGATARGAGRGGCGLADPERPGKHRVLVHDIRNAERVCPRTPVSASHFVVPHSALDDPSSPELDIATRSRYSPRCSWCSTTVHAPVQSLPSLRRATNASTCIPAIGSALGAGTTAPRELRALTDGRRLLMSHSRRPRRNTSARSALHTAPDLNFPVPDARFQRTFEGFTLRLFNACRRKRIRRLLKAIEDHRRIGVAAIDSATARCLPAVHRRNWLRNAEPQSGRGIYRLFAGSGRASNEAEAPPVVHDTTHARVRDLACAVCLATAAANAGTATRSSTFDAGADGTVILMLIMGYGISMDVETCALRCSTATRPSVASVDTQPLRFPLLYRTAALTSYDELDRRMRAGDIRWRLRSRPISGAISRVVACGTRRLDRRSDAEPCETVKGYVQAMHQSWLQVDAKYPVRKVLGKKTIAINDIYRYDELNFPASPERFHRHHASPCYTGVDFVKAAPRRSAISCIRRRWCFRPVSNTSSIAARIPLCACWKRYRHCRENRASLPRPKSCDRVSNIFPVDIRRGTVTGSKSDGKVRSGFRLAVGQCQWCRCRPGQDRKGIAKQIGRHHHIESFRLITKRAQRISICCLSQRTPVRLLMAKPFDLVAEVSVLRTGFAQVRRHNAKCDRHTAGKYRFLNDDFMLCTSFTLPPSEEYSPSVFSLPRKNRCRQAVFPPAGRNARKETNRAQVDVLVESRRNFSSEPHNEICSFAMRHTNPSPKAVGPRLSRRYTLPEIAQYWKFSPEQQDLSQRVDGLFTAGKARIRHNASRMNLSGIMVKFVLMSTKNGTQALIPADCRSHREQIARGSLNLAMRYPRISATNRVWRHGLRLSRSNARDRMNILRRKMPAEKINENLFSAAS

SEQ ID NO: 60657 - protein, 1273 aa, Homo sapiens
  DOMAIN (604)..(638): Bacterial regulatory proteins lysR family proteins. domain identified by eMATRIX, accession number BL00044, p-value=7.000e-14, raw score of 19.03
  DOMAIN (590)..(724): Bacterial regulatory helix-turn-helix prote domain identified by PFam, accession name HTH_1, E-value=2.8e-24, PFam score of 94.1
MKIPSLVGPDGKTSLREYAGYHGGGGGFGGQLRGWNPPSESADAALLPNFSRGNARADDLVRNNGYAANAVQLHQDHIVGSFFRLSYRPSWRYLGINEEDSRAFSRDVEAAWNEYAEDDFCGIDAERKRTFTMMIREGVAMHAFNGELCTQATWDSDSTRLFRTQFKMVSPKRVSNPNNIGDTRNCRAGVKINDSGAALGYYVSDDGYPGWMAQNWTYIPRELPGGRPSFIHVFEPMEDGQTRGANAFYSVMEQMKMLDTLQNYQLQSAIVKAMYAATIESELDTHRRWTYSRRGYTGAESNYRAGPAGYTAAVYAARANLQPVLITGMEKGGQLTTTTEVENWPGDPNDLTGPLLLERMHEHATKFETEIIFDHINKVDLQNRPFRLNGDNGEYTCDALIIATGASARYLGLTSEEAFKGRGKNPLKRWRLTGHGTYSANQRHRSTPGSLMYGCENGGSTLRQLDKLNSLLDGALKAGLNEIRSVSLGVAQPDAYKDKARKAAIDNAIHQAQELANGFHRKLGPVYSVRYHVSNYQPSPMVRMMKADAAPVSAQETYEQAAIQFDDQDRLTETVKRTRMRGRGMDIFISKKMRNFILLAQTNNIARAAEKIHMTASPFGKSIAALEEQIGYTLFTRKDNNISLNKAGQELYQKLFPVYQRLSAIDNEIHNSGRRSREIVIGIDNTYPTIIFDQSISLGDKYQGVTAQPVEFSENGVIDNLFDRHMYLHEFRTWKPDYHEYSAAIGFSIHARHFVICVAACKILMIRPVTNATNNSGAASASATFIASVPIIMTDSGVILPLLAVKALRQRTDQQLPAIHQYKQHQFKGQSNGGWGNHHHPQCHQHAGYHQVDNQKRDENREAYLKCGFQLAGHERCAGNRHCQARDSGRGGEKQARFYLYNVSRENWENPGTEIQITRTPGYYPFAKEYTRDSPRSPGTGGYLLQSEKSLTDFFAPLRSVPSLQIGRLEVIDARLQGPDWAVTDLDLSLRNMTFSKDDWQTQEGKLSMNASEFIYGSLHLFDPIINTEFSPQGVALRQFTSRWEGGMVRTSGNWLRDGKTLILDDAAIAGLEYTLPKNWQQLWMETTPGWLNSLQLKRFSASRNLIIDIDPDFPWQLTALDGYGANLTLVTDHKWGVWSGSANLNAAAATFNRVDVRRPSLALTANSSTVNISELSAFTEKGIREATASVSQTPTRQTHISLNGRGVPVTYLHQWDGLITVTAKGYQLPPRELSQSVNHRGPSSASARPCVTHVGCSGKNQARENIAENTGA

SEQ ID NO: 60658 - protein, 621 aa, Homo sapiens
  DOMAIN (67)..(83): Serine/threonine dehydratases pyridoxal-phosphate attachment domain identified by eMATRIX, accession number BL00165D, p-value= 9.471e-15, raw score of 16.11
  DOMAIN (1)..(225): Pyridoxal-phosphate dependent enzyme domain identified by PFam, accession name PALP, E-value=5.3e-23, PFam score of 89.8
MRKGFPLLRDAGIDGKVVMPKGAPKSKVAATCDYSAEVVLHGDNFNDTIAKVSEIVEMEGRIFIPPYDDPKVIAGQGTIGLEIMEDLYDVDNVIVPIGGGGLIAGIAVAIKSINPTIRVIGVQSENVHGMAASFHSGEITTHRTTGTLADGCDVSRPGNLTYEIVRELVDDIVLVSEDEIRNSMIALIQRNKVVTEGAGALACAALLSGKLDQYIQNRKTHFQSRQTLSPNTNAATARVLDRLGISVMPANEAGCCGAVDYHLNAQEKGLARARNNIDAWWPAIEAGAEAILQTASGCGAFVKEYGQMLKNDALYADKARQVSELAVDLVELLREEPLEKLAIRGDKKLAFHCPCTLQHAQKLNGEVEKVLLRLGFTLTDVPDSHLCCGSAGTYALTHPDLARQLRDNKMNALESGKPEMIVTANIGCQTHLASAGRTSNKPLKRNNKMKTKVILSQQMASAIIAAGQEEAQKNNWSVSIAVADDGGHLLALSRMDDCAPIAAYISQEKARTAALGRRETKGYEEMVNNGRTATLNSHPVPPGLIRERRRGMKPADRRGLKTLKRESLRRNLKTRLPYPNCLHSRIALPYTLLPLPSPTPPPPDVMPVATSPCWAVFDVAE

SEQ ID NO: 60659 - protein, 333 aa, Homo sapiens
  misc_feature (1)...(333): Xaa = X or * as defined in Table 2
MNASFSGTGTAIALRHKRGFNVGRLRQPTLSPNTNAATARVLDRLGISVMPANEAGCCGAVDYHLNAQEKGLARARNNIDAWWPAIEAGAEAILQTASGCGAFVKEYGQMLKNDALYADKARQVSELAVDLVELLREEPLEKLAIRGDKKLAFHCPCTLQHAQKLNGEVEKVLLRLGFTLTDVPDSHLCCGSAGTYAXTHPDLARQLRDNKMNALESGKPEMIVTANIGCQTHLASAEEEEGGGEGTGERRGRVGTKTEPPLHHRNPTQPNHPQRQDRTEQTDTTRNKQHRTPHMDTEQAKGKRENGHPRHHLCNTRHPLAKRSASSHLYCFR

SEQ ID NO: 60660 - protein, 468 aa, Homo sapiens
  DOMAIN (91)..(136): TRANSPORT GLUCONATE TRANSMEMBRANE PROTEIN PERMEA domain identified by eMATRIX, accession number PD02680B, p-value=2.800e- 35, raw score of 27.96
MILGFGAMLGKLISDTGAAQRIATTLIATFGKKRVQWALVITGLVVGLAMFFEVGFVLLLPLVFTIVASSGLPLLYVGVPMVAALSVTHCFLPPHPGPTAIATIFEANLGTTLLYGFIITIPTVIVAGPLFSKLLTRFEKAPPEGLFNPHLFSEEEMPSFWNSIFAAVIPVILMAIAAVCEITLPKTNTVRLFFEFVGFSWRNQEVECHVQLTVCCDRDERTVLSQRVVPDAAFADLRRTEYDTQRQLRQQKCSDRQQQQMFSSRSSWSRLRFIAMRRLTPAGKRKILDTLATYHEQHRDEPGPGRERLRRMALPMEDEALVLLLIEKMRESGDIHSHHGWLHLPDHKRASAKSSRPSGKKQSHCLVTQRGGGRQRTVSPALAHTGTLAPPPLQCLVLDFPAWPTRSPCTLLWCTGPNHGNATVTVDEPTAGEASNGHPQGKTGINQRTMGTSMDSQGNLRYSRKVSS

SEQ ID NO: 60661 - protein, 315 aa, Homo sapiens
  DOMAIN (181)..(315): Prokaryotic transcription elongation factor domain identified by PFam, accession name GreA_GreB, E-value=1.5e-06, PFam score of -4.9
MVPHRNAVDGTAGIAFLLHSCVQYQRGEVICYGFDFWIFFLIENFQVSVAVIAAFDLIAACSSSTNSNLRYTGFLKEKLPLQLMGYGPIRIPLALIRQFTNERCRKFFTQHINDFRIMRQSWVDSVSHPANERQPQLFPESAWRYGTERGELAGRKINVQTKPRGDRARYLKLARTNAATALTSKLSQQSTVHQRLTALASVLKLPEVKRMECFDISHTMGEQTVASCVVFDANGPLRAEYRRYNITGITPGDDYCSGGCLIFGATVTVLNLDSDEEQTYRIVGDDEADFKQNLISVNSPIARGLIGKEEDDVVA

SEQ ID NO: 60662 - protein, 349 aa, Homo sapiens
  DOMAIN (58)..(113): Respiratory chain NADH dehydrogenase 49 Kd subunit proteins domain identified by eMATRIX, accession number BL00535A, p-value= 1.000e-40, raw score of 22.06
  misc_feature (1)...(349): Xaa = X or * as defined in Table 2
XLPDQRRLVLPDDWPEDMHPLRKDAMDYRLRPEPTTDSETYPFINEGNSDARVIPVGPLHITSDEPGHFRLFVDGEQIVDADYRLFYVHRGMEKLAETRMGYNEVTFLSDRVCGICGFAHSVAYTNSVENALGIEFGWKQSLIAAVVVLMTRVVVVRYFPHLNPESIEIFIGMVMLLGIAITHDLRHRDENDIDASGLSVFEERTSRIIKNLPYIAIVGALIAAVASITIICCQRSVDLHTGESIFRRRNAGTIANADAYRGVDLRIFRQTVIQLRLIGVMQHVHNVRTTDPFRVVDASMFVTTRFQFRHALFRQLQHLLLGAEVDSPGRTGFHTSRFLADADISAHDG

SEQ ID NO: 60663 - protein, 1233 aa, Homo sapiens
  DOMAIN (1091)..(1105): LYSYL-TRNA SYNTHETASE SIGNATURE domain identified by eMATRIX, accession number PR00982C, p-value=3.953e-09, raw score of 5.59
MLLNQFQQSYTPMLHDLIVRYDGDIHQQKSFGCTTAGQVADRQMYRLRGGNHRNAVPELEFVICRTESRFGEKTRPRHNNLSGPTTVQSRAQITIKIGTHNPDRNNKGDDAAITSSIAARIPLCLAGNAHRHCRENRASLPGPNRGDRVSNIFPVDIGAEPWTGSKSDGKVRSDSGWRMGQCQWCRCRPAKIGKDIAKQIGRHHHMNRSGCITKRAQRISICACPSGSPGNSRPLLPLVIPYGMLMAKPFDLVAELVSYVDGFAQVRRHNANAIDTTAARNIRLRCFPMVRNGIRPADGTKIDGVETAKLLMPVVRHHFTVMAVILAVSPTPFAQNSRRSPSAQRQPVTGESLRKDLLLANPGLPAIAAIRIVCIIGKQLLTALPVDVLGSLGELARRWFQLLHCSRWWRFLPVWLEAKSDRRRGGTVTRVSCAISHILTLNHRNLYWHGDAAGDRDNSDLRHRDENDIDASGLSCLKNARHGLSKTYPISHRGSIDCRRCQHEDFCCSEVVPELEFDTVFVSGPRSFSAAAQHPVKRLYADHSALPPLLPSSDLPKGGCTGRPALYTKWYRQHLGGLAMILGFGAMLGKRFLIRGLLPSRLSLRLISERFTVWIYHYHSDSYCRRTLFSKLLTRFEKAPPEGYLILICLAKRRCPPSGQYFRCRDPGHPDGYRRPYGWLYSASACLFHRCTSVSELAVDLVELLREEPRKNWQFAAIKSWPSTVRYPTTCAKAERRSGKTICARFSGNICVNASRSGTPVRDNKMNALESGKPEMMSPPTLVARRIWRAPVVLCGTGVGVGTIGAGGFWFTRQDASPKRGQGLEQPNSGPDVLMVDGIRSGRTQDRDLYRSGDFLPAKREVSESGFRRTGKAAGWLIISGPESTKPGTLVPAACQKTSNQSVTARDAENERGGNGDQDINVSKNRRSISGRPCEIPGTFAISSTLALRKPCKPPIYFNNICRRFGPTPSMVSRELVFLTFARFYGARQSRDHVIHREYAAPILRTQRAVSIKHTQEATVCSPMVWLMSKPPSASLPAISTRWQARSSLVNGRFAAKVCWLRPRRIGAREFQITRPIAAKYTTRAGTGAVSETLVVGGFERVFEINRNFRMKASMCLISANRLKNSPCRSNQKISSRNRYGRPGYFDAAKALAESIGITVEKAGGWDVLSQRSLMKWRSTSDSANLYYGISGRMSPLARRNDVNPEITDRLNSSSVVVKSVMVLANKRRRRSG

SEQ ID NO: 60664 - protein, 222 aa, Homo sapiens
  DOMAIN (1)..(155): impB/mucB/samB family domain identified by PFam, accession name IMS, E-value=0.0084, PFam score of -96.2
MGIKTVLDLADTDIRFIRKHFNVVLERTVRELRGEPCLQLEEFAPTKQEIICSRSFGERITDYPSMRQAICSYAARAAEKLRSEHQYCRFISTFIKTSPFALNEPYYGNSASVKLLTPTQDSRDIINAATRSLDAIWQAGHRYQKAGVMLGDFFSQGVAQLNLFDDNAPRPGSEQLMTVMDTLNAKEGRGTLYFAGQGIQQQWQMKRAMLSPRVVQREVLIY

SEQ ID NO: 60665 - protein, 310 aa, Homo sapiens
MTLRLPLPLEAVGLENAARVLKLYPFEMSGRHSCSGDPLGVNPKPNYIPGLIAVVGCDGTGKSTLTTDLVKSLQQHWQTERRYLGLLSGEDGDKIKRLPLVGVWLERRLAAKSSKTQSMKTKSPALWAAVIMYCFSLRRMANLRKVQRLAQSGVLVVSDRFPQAEISGFYYDGPGIGVERATGKISMFLAQRERRLYQQMAQYRPELIIRLGIDIETAISRKPDHDYAELQDKIGVMSQEPAWAKPQFWGSPVLHHVGIGNCAVNAVDFGHFRHHRFEGAGEDAGPCLQQHETNYGFNRAFNNNADTFAQ

SEQ ID NO: 60666 - protein, 711 aa, Homo sapiens
  DOMAIN (257)..(277): w LOW TRANSPOSASE SAPA 12K domain identified by eMATRIX, accession number DM00475B, p-value=1.300e-15, raw score of 12.12
  DOMAIN (191)..(283): Transposase domain identified by PFam, accession name Transposase_8, E-value=1e-32, PFam score of 122.1
MVGSQMPIAVSHGEGRVEVRDAAHLAALESKGLVALRYVDNFGKVTETYPANPNGSPNGITAVTTESGRVTIMMPHPERVFRTVSNSWHPENWGEDGPWMRIFRNARKQLGIRLFASDESNTLKRWPVFPRSLRLLVMLAFLLILLPLLVLAWQAWQSLNALSDQAALVNRTTLIDARRSEAMTNAALEMERSSEKIAIVQQSFEPGMTVSLVARQHGVAASQLFLWRKQYQEGSLTAVAAGEQVVPASELAAAMKQIKELQRLLGKKTMENELLKEAVEYGRAKKWIAHAPLLPGDGERTDDWMDGRRSRHTDDTDVLLRIHHVIGELPTYGYRRVWALLRRQAELDGMPAINAKRVYRIMRQNALLLERKPAVPPSKRAHTGRVAVKESNQRWCSDGFEFCCDNGERLRVTFALDCCDREALHWAVTTGGFNSETVQDVMLGAVERRFGNDLPSSPVEWLTDNGSCYRANETRQFARDVGDLKPKEHGRLRSPDEQSIHSAHAKTLDTQGLRNEFLVEKVFVADEYTMVYSHIDRIIVGGIMPITKTVSVGGEVGKQLGVSYFLERRELGVINIGGAGTITVDGQCYEIGHRDALYVGKGAKEVVFASIDTGTPAKFYYNCAPAHTTYPTKKVTPDEVSPVTLGDNLTSNRRTINKYFVPDVLETCQLSMGLTELAPGNLWNTMPCHTHERRMEVYFYFNMDDDACVST

SEQ ID NO: 60667 - protein, 1338 aa, Homo sapiens; identical to SEQ ID NO: 46145
  DOMAIN (369)..(401): PROTEIN PLASMID NODULATION COBALT RESISTANCE TRA domain identified by eMATRIX, accession number PD02581B, p-value=9.735e- 28, raw score of 19.43
  DOMAIN (976)..(1118): Prokaryotic DNA topoisomerase domain identified by PFam, accession name Topoisom_bac, E-value=4.3e-53, PFam score of 189.8

SEQ ID NO: 60668 - protein, 444 aa, Homo sapiens
  DOMAIN (242)..(261): Signal carboxyl-terminal domain proteins domain identified by eMATRIX, accession number PF00512, p-value=4.316e-11, raw score of 13.94
  DOMAIN (160)..(230): HAMP domain identified by PFam, accession name DUF5, E-value= 1.8e-09, PFam score of 44.9
MLAFLLILLPLLVLAWQAWQSLNALSDQAALVNRTTLIDARRSEAMTNAALEMERSYRQYCVLDDPTLAKVYQSQRKRYSEMLDAHAGVLPDDKLYQALRQDLHNLAQLQCNNSGPDAAAAARLEAFASANTEMVQATRTVVFSRGQQLQREIAERGQYFGWQSLVLFLVSLVMVLLFTRMIIGPVKNIERMINRLGEGRSLGNSVSFSGPSELRSVGQRILWLSERLSWLESQRHQFLRHLSHELKTPLASMREGTELLADQVVGPLTPEQKEVVSILDSSSRNLQKLIEQLLDYNRKQADTMANLRKVQRLAQSGVLVVSDRFPQAEISGFYYDGPGIGVERATGKISMFLAQRERRLYQQMAQYRPESIIRLGIDIETAISRKPDHDYAELQDKIGVMSKIGYNGTKILEIDSRAPYSEVLEQAQKAVSLVAIVSDRRSLT

SEQ ID NO: 60669 - protein, 364 aa, Homo sapiens
  misc_feature (1)...(364): Xaa = X or * as defined in Table 2
MGKRHERPPHIKSNTSVLIVKLDARSYPRSNESQQELVLRRMAGRGDVVLSGCPRRQQAMQDTTHVSTHRSTHADILPSRRHRPMHAATRRIQGRALLPTHPTQVCNDSSGHRVISQEYTRMVTLFMVQRAKKTVAYPLASVLADNDGQGPCLARSKSDDETRANDAVNRYKLLKKDARTIAAQQVARLESAMCLRRRWSLENFQLFLVEHPLVRHLTRRLIWGVYSAENQLLACFRVAEDNSSSTADDDLFTLPEGDISIGTPHVLEISPTDAAAFGQLFADYELLPPFRQLDRNSYALTEAERNAQCNXDPAVAGRKCPSGRVMGLANKGWIRANHRMDLDPEDDQPLGRWSLSWKSMKALR

SEQ ID NO: 60670 - protein, 964 aa, Homo sapiens
  DOMAIN (513)..(525): ALPHA-AMYLASE SIGNATURE domain identified by eMATRIX, accession number PR00110B, p-value=2.723e-09, raw score of 13.38
  DOMAIN (460)..(834): Alpha amylase domain identified by PFam, accession name alpha -amylase, E-value=4.4e-28, PFam score of 106.7
MNINDRACSLYALQGSPDERSTVPHGSNRNRARACSPPQPTAQPRHNRDTPRQAMQNPNRQKELSGTNAGFWLASELAPAVARAFNKLKTLRENARSWLLKYPEHALTGLLPAALGKAGEAQDNARAALRMLTENGHQPLLQEIARRYNQPEVTDAVNALLALDPLDNHPTKIPTLPAFYQPSLWTRPVLKANAQSLPDSALLHLGEMLRFPQEEALYPGLLQVKDVCSADSLAGFAWDLFTAWQTAGAPSKESWAFTALGVLGNDDTARKLTPLIRAWPGESQHKRATVGLDILAAIGSDIALMQLNGIAQKLKFKALQERAKEKIADIAESRELTVAELEDRFTVSFDETLKPFVRDVSGSRLKDLPKPNKSDDETRANDAVNRYKLLKKDARTIAATAGLGEVFAFLGFRCQWRTRRRGEGDAATDKLVKGAGFHYAAPMGKVWFIVGLVVSRYYIAIDATNIIGFSLYCCAFLHTGGTELSSVLCRDPDSTYGNPGRFGRLVTQSNSRGIRIILDMVFNHTSTQHAWFREALNKESPYRQFYIWRDGEPETPPNNWRSKFGGSAWRWHAESEQYYLHLFAPEQADLNWENPAVRAELKKVCEFWADRGVDGLRLDVVNLISKDPRFPEDLDGDGRRFYTDGPRAHEFLHEMNRDVFTPRGLMTVGEMSSTSLEHCQRYAALTGSELSMTFNFHHLKVDYPGGRSPTMTQFPKKILVTCALPYANGSIHLGHMLEHIQADVWVRYQRMRGHEVNFICADDAHGTPIMLKAQQLGITPEQMIGEMSQEHQTDFAGFNISYDNYHSTHSEENRQLSELIYSRLKENGFIKNRTISQLYDPEKGMFLPDRFVKGTCPKCKSPDQYGDNCEVCGATYSPTELIEPKSVVSGATPVMRDSEHFFFDLPSFSEMLQAWTRSGALQEQVANKMQEWFESGLQQWDISRDAPYFGFEIPNAPGKYFTSG

SEQ ID NO: 60671 - protein, 404 aa, Homo sapiens
MFCVSRASPSLFNRVSRNPAVNVGPARKRIGDVPDTICACVFQFATDFWLTASGSYQAHSSGSNPVAPTSRPRISLRHAQKLKFKALQERAKEKIADIAESRELTVAELEDRFTVSFDETLKPFVRDVSGSRLKDLPKPNKSDDETRANDAVNRYKLLKKDARTIAAQQVARLESAMCLRRRWSLENFQLFLVEHPLVRHLTRRLIWGVYSAENQLLACFRVAEDNSSSTADDDLFTLPEGDISIGTPHVLEISPTDAAALLFADYELLPPFRQLDRNSYALTEAERNASELTRWAGRKCPSGRVMGLANKGWIKGEPQDGGWIGWMIKPLGRWSLIMEIDEGFAVGMSPAELSAEQLLSKLWLWEGKAERYGWGSNSTQEAQFSVIDAITASELINDIEALFE

SEQ ID NO: 60672 - protein, 666 aa, Homo sapiens
  DOMAIN (509)..(615): Bacterial regulatory helix-turn-helix protei domain identified by PFam, accession name HTH_1, E-value=1.5e-26, PFam score of 101.6
MAQLVPLCLSVFTNRYVDLGKQPVLYTPSYNIAFGRHHPPYYRQDCASISCKQGPATCIWPYPPTSLAPDLDIGRTGLPWIAGTFIPTLYGILGAGYYQHPVILGCNSSRKSLYLHTFRSRHTPVNVLQVKDVCSADSLAGFAWDLFTAWQTAGAPSKESWAFTALGVLGNDDTARKLTPLIRAWPGESQHKRATVGLDILAAIGSDIALMQLNGIAQKLKFKALQERAKEKIADIAESRELTVAELEDRFTVSFDETLKPFVRDVSGSRLKDLPKPNKSDDETRANDAVNRYKLLKKDARTIAAQQVARLESAMCLRRRWSLENFQLFLVEHPLVRHLTRRLIWGVYSAENQLLACFRVAEDNSSSTADDDLFTLPEGDISIGTPHVLEISPTDAAAFGQLFADYELVPPFRQLDRNSYALTEAERNASELSRWAGRKCRVVGSGAGNTVEKMMKKTAAIISACMLTFALSACSGSNYVMHTNDGRTIVSDGKPQTDNDTEPRQVDRHQIKSLEDFLGLKLFRRRNRSLLLTEEGQSYFLDIKEIFSQLTEATRKLQARSAKGALTVSLLPSFAIHWLVPRLSSFNSAYPGIDVRIQAVDRQEDKLADDVDVAIFYGRGNWPGLRVEKLYAEYLLPVCSPLLLTGEKPLKTPTRMPRKKKTAKTK

SEQ ID NO: 60673 - protein, 426 aa, Homo sapiens
  DOMAIN (64)..(81): Domain of Unknown Function 2 domain identified by eMATRIX, accession number PF00563B, p-value=4.400e-15, raw score of 8.97
  DOMAIN (1)..(154): Domain of unknown function 2 domain identified by PFam, accession name DUF2, E-value=3.6e-06, PFam score of -9.4
  misc_feature (1)...(426): Xaa = X or * as defined in Table 2
MLKRSEKPLTVCYIRCPTLVSQCWAKYQIEAWQLIFEVTESNALTNVKQAQITLQHLQELGCQIAIDDFGTGYASYARLKNVNADLLKIDGSFIRNIVSNSLDYQIVASICHLARMKKMLVVAEYVENEEIREAVLSLGIDYMQGYLIVLSGDFWCTFFFNFQPPASHAFPVFLLLFQIKQYQRILTKPVMRETQCPVTVISNQRQCWRDIALMQLNGIAQKLKFKALQERAKEKIADIAESRELTVAELEDRFTVSFDETLKPFVRDVSGSRLKDLPKPNKSDDETRANDAVNRYKLLKKDARTIAAQQVARLESAMCLRRRWSLENFQLFLVEHPLVRHLTRRLIWGVYSAENQLLACFRVAEDNSSSTADDDLFXPCRKAISLSALLTFWKYHQRMLPPLSAFADYELLASWLTIVSVCARNN

SEQ ID NO: 60674 - protein, 259 aa, Homo sapiens
MASVTKDLYHSTQVLSNTWKAFQRKMSPNNPKSAESKKADSRQKGPRLEGPGGPLVPTGSPGSRQKRDRNQHTKETDTEKARHKTRRGDNAPQRAVRSGKKQKKTQQRSEPEHGSARYPVNIRRNCAHASGVDKQFIYRAALHHFSIASNDGNACRAGGFCHAGHYGFQCLHRQSFFEDKATGEIARNNATDRNVIGCAANRQLADITAREEQRVNNVTVGGERQTVAFRYQLRQIKTCLIFLLCQPRVGKGFHKQAVD

SEQ ID NO: 60675 - protein, 285 aa, Homo sapiens
MVGLPIAAALGALGGNANAGLEVLKDATAQAIADAKALLAAGKVSVKIQEPCDEILFSRAKVWNGEKWACVTIVGGHTNIVHIETHDGVVFTQQACVAEGEQESPLTVLSRTTLAEILKFVNEVPFAAIRFILDSAKLNCALSQEGLSGKWGLHIGATLEKQCERGLLAKDLSSSIVIRTSAASDARMGGATLPAMSNSGSGNQGIGTELNVSCRFPATNLFVHDPTQQAMQRNQRRFAVQTFPVWRVAQHCAVRPFRQRIGQLRDIFHLKGDQFTNRPAKIVAF

SEQ ID NO: 60676 - protein, 214 aa, Homo sapiens
  DOMAIN (116)..(160): Orn/Lys/Arg decarboxylase domain identified by PFam, accession name OKR_DC_1, E-value=0.0018, PFam score of 14.9
  misc_feature (1)...(214): Xaa = X or * as defined in Table 2
MSDAEDGARTTLGSGNAVERLADALSQQNVTVIKSTSLDDGFAILSSNEAIDCLMFSYQMEHPDEHQNVRLLIALAAMDRDLLELVDGIRLDIWKIPPTLSPERAVAAMTRYRQQLLPPLFSALMKYSDIRVNIPGQRQATRAALVLTKTPAGRFYHDYYRLLRVAWVLHKTECRLINFPETPIFGNSFRYDIEVSNESPDEEVKLRRHHLARX

SEQ ID NO: 60677 - protein, 489 aa, Homo sapiens
MQQLINSLFMEAFANPWLAEQEDQARLDLAQLVAEGDRLAFSTDSYVIDPLFFLAVISASWRFGFYFALAHIVVPLGSMGMDVYVVERLGLGTTHYTSVTRPDSFISGDGAAWVKVVSVILNIFAVMTAFFGVYLGFREATQGIVMNILRRKMPAEKINENLVQRGIMIFAILLAWSAIVLNAPVLSFTSICSPIFGMVFNMFDSTLNPLWQRYILAVQEEVKPALGCTEPISLALAAAVAAAELEGPVERVEAWVSPNLMKNGLGVTVPGTGMVGLPIAAALGALGGNANAGLEVLKDATAQAIADAKALLAAGKVSVKIQEPCDEILFSRAKVWNGEKWACVTIVGGHTNIVHIETHDGVVFTQQACVAEGEQESPLTVLSRTTLAEIVGYTSNEPVMLCLMSAIETGVIFLINDGIDRGLNLRSNFIDKLQQVAIHCGEGFFPIAQQEDRHVLLALMKLTDQLSDVLMFVRMFHLIAEHQAVNGFV

SEQ ID NO: 60678 - protein, 985 aa, Homo sapiens
  DOMAIN (471)..(492): GLUTELIN SIGNATURE domain identified by eMATRIX, accession number PR00211B, p-value=4.917e-09, raw score of 0.86
MSIESRHSFTIPGVFKANRRYTMAVVSSSRRPVCRCGADLLKQLHPAGAVLTAEVTKGRQNLRQKGGDQEKEEKKKGNKTQERKEKGNSTLTTVTNISPGSPAHPNLSVIIFSSCHRPIHFDAFCVPSFKCTGSNACSPLATVVVVVGRLSVPCIRDLLSRLKYLSRTVNSYSRLWLAIDGFYGRHAVEVLYQNQARYSVCFNCWNLTCHRNALRLLCKNGRFIRVLSSHYQWSYRYRDARHADFDHVILAIAASPSKKPSLPWKSVWHWHSRQPRIGERGSAPHKRAPSVLILRSNQRNTTQQATDELTQFSMNAGCLLRVRPKCMQAGMACFVLAVVCVPWCGPQSGPGQCRYSALLFTIVYFLILYPNTYVCGSLVSVFPRIGPLRGECRLLIAVGPCSSRIRISSGITSSRSVHFSHILNLHHVRFSPLQALAYRVLALCLPTKPATDCIAYPTFSVPSTRVFRIKALPIILPPPFSFRPIYHIVPPANGRIRSTPYSFARNGSCLLSRLSVTRLPLSPIFVRVYPRRTAVCFSPPFNTHLNKAVGAGLCYAIRIRIPFPAYSPCGSGMRVTSRQRQGKAPGKFGISSAIASVMAVINWRCYEFLVYSSKSIRARQCVQPQVILAHNACIQASVVDNSGHTFKFAVVVFVPLYFLGPVILSMHCPSAIVCPLLSLKSALYDGQFRSVQVPTSSRHCMLMYLDPTYQPPTPPCRPSRLHRRGYHHGPPITILNRRYTDVAISGTTAHYGPSLEVPTTVPYKALQLGDQFGSAHQERLPVLVVFLRVLTGDSGDFRRSRHMMMPSLSVDHGVPRNAGRKPLHSLRRQSRTAVEQTIDKPFETYRDFTSLRPKSLTTRSIIADKPAFYRRQHLCPTADDVEQQRQIELITQCQQARHRTSEEQSIRIAPSLSSIRYGNRPAINAKRQARFLNRGNINVSARPSTNGCTRSCSFTDRMPSLRRGRYASRLSAIGQQCVGPVFHHL

SEQ ID NO: 60679 - protein, 210 aa, Homo sapiens
MLMYLDPTYQPPTPPCRPSRLHRRGYHHGPPITILNRRYTDVAISGTTAHYGPSLEVPTTVPYKALQLGDQFGSAHQERLPVLVVFLRVLTGDSGDFRRSRHMMMPSLSVDHGVPRNAGRKPLHSLRRQSRTAVEQTIDKPFETYRDFTSLRPKSLTTRSIIADKPAFYRRQHLCPTADDVEQQRQIELITQCQQARHRTSEEQSIRIAP

SEQ ID NO: 60680 - protein, 584 aa, Homo sapiens
  DOMAIN (56)..(74): PHOSPHORIBULOKINASE FAMILY SIGNATURE domain identified by eMATRIX, accession number PR00478A, p-value=5.200e-17, raw score of 13.44
  DOMAIN (55)..(130): Phosphoribulokinase domain identified by PFam, accession name PRK, E-value=1.7e-28, PFam score of 103.4
MLGLSSPGRQWLGKPIVEVVRPADFFTEQIDEKRLDVVANFNGLSVIANREAIRSGSSGAGTTTTSLAFRKIFAQLNLHAAEVEGDSFHRYTRPEMDMAIRKARDAGRHISYFGPEANDFGLLEQTFIEYVCSTATSALAGENSAGASFLRFDSTPWSTDKDGIIMCLLAAEITAVTGKNPHEHYNQLAKRFGAPNYNRLQAAATSSQKAALSNLSPEMEMAVGLSQIISTQLEVSRAEQLREMANKAELRALQSKINPHFLFNALNAISSSIRLNPDTARQLIFNLSRYLRYNIELKDDEQIDIKKELYQIKDYIAIEQARFGDKLTVIYDIDEEVNCCIPSLLIQPLVENAIVHGIQPCKGKGVVTISVAECGNRVRIAWSIEKQSVIFEKAGNSTDSALAAVFVPTGYDEYTSSAYSSLLGQIVQPWFYNQLRTEEQLGYAVFAFPMNVGRKAGETYNIGGHNKEKNIDVVLTICDLLDEIVPKEKSYREQITYVADRPGHDRRYAIEAEKIGRALGWKPQETFDSGIRISVEWYLSNTKWVDNHPPCNRGHCFWIQINKFLAGHIFSGFIGCQRRLCVHQ

SEQ ID NO: 60681 - protein, 211 aa, Homo sapiens
  DOMAIN (5)..(38): Bacterial export FHIPEP family proteins domain identified by eMATRIX, accession number BL00994D, p-value=2.667e-33, raw score of 15.38
  DOMAIN (83)..(162): PTS HPr component phosphorylation sites domain identified by PFam, accession name PTS-HPr, E-value=1.6e-46, PFam score of 168.0
  misc_feature (1)...(211): Xaa = X or * as defined in Table 2
MGHAAESYTLLTIGDGLVAQIPALVISTAAGVIVTRVSTDQDVGEQMVNQLSSNPSEIFLLAERDAATLLALLTSDDAPTDDVLSAEFVVRNEHGLHARPGTMLVNTIKQFNSDITVTNLDGTGKPANGRSLMKVVALGVKKGHRLRFTAQGADAEQALKHIGDAIAAGRIMSRRVATITLNPAYDLVGFCPEIERGEVNLVKTTGLHAAX

SEQ ID NO: 60682 - protein, 510 aa, Homo sapiens
  misc_feature (1)...(510): Xaa = X or * as defined in Table 2
MVLFPFQIPRGCCQPLSARHILSICEKAEPLIFPYNGPVRLADKAFTRQRMPDATLARLSGLQTAPNRLCRTVGRIRRCAASGSWSTMPDATLDALIRPTSLCRTVGRIRHSQIERRKYQPAHPAHLYASANGSTSSGVALAQLAPRHTRRGHETRSGVPNIAESLDKRRQFFRCVEIIHLAVISNRLYGADRVLPSCLSSGSEALVVVVLALTISGDSLDSAAFVRKSQLPANGCSSAHKAFCQFVVVFLRVLTAEAAVEQTIDKTFETTGTSTSLRPKSFDTGRSSQMKPAFYRRQHLSPLREMLEQVIDCQRQEWFGFIKTGRMTIRGRGGNSLREPFAVCNERGHRRRLLRTEWGVVHQHPSTACAARCRQAAISASADGDRGTSLRRYSCHREKWLEKVEISPNRNDHLPTTFSGGASGESGLTDRVLDDPHHPYNSCWCHRFCRIEPVPDARKRLIRPTNALPRIVILLDRRYLRSRQLLQDEMKRKRSWWRWGILRQRCPRIX

SEQ ID NO: 60683 - protein, 351 aa, Homo sapiens
  DOMAIN (1)..(321): Phosphoglucomutase/phosphomannomutase domain identified by PFam, accession name PGM_PMM, E-value=1.4e-09, PFam score of -18.6
MASGHVKEQDLVQPFVEGLADIVDMAAIQKAGLTLGVDPLGGSGIEYWKRIGEYYNLNLTIVNDQVDQTFRFMHLDKDGAIRMDCSSECAMAGLLALRDKFDLAFANDPDYDRHGIVTPAGLMNPNHYLAVAINYLFQHRPQWGKDVAVGKTLVSSAMIDRVVNDLGRKLVEVPVGFKWFVDGLFDGSFGFGGEESAGASFLRFDGTPWSTDKDGIIMCLLAAEITAVTGKNPQEHYNELAKRFGAPSYNRLQAAATSAQKAALSKLSPEMVSASTLAGDPITARLTAAPGNGASIGGLKVMTDNGWFACAVLSGTEDAYKIYCESFLGEEHRKQIEKEAVEIVSEVLKNA

SEQ ID NO: 60684 - protein, 753 aa, Homo sapiens
  DOMAIN (120)..(130): PTS EIIA domain proteins phosphorylation site proteins proteins 2 domain identified by eMATRIX, accession number BL00372, p-value=1.000e-12, raw score of 5.71
  DOMAIN (87)..(148): phosphoenolpyruvate-dependent sugar phosph domain identified by PFam, accession name PTS_EIIA_2, E-value=3.2e-28, PFam score of 105.2
MCLLAAEITAVTGKNPQEHYNELAKRFGAPSYNRLQAAATSAQKAALSKLSPEMRLNRFNSAREENYVPVIRTGHPSGRKGRRQKEAIRQVAAALVQAGNVAEGYVNGMLAREQQTSTFLGNGIAIPHGTTDTRDQVLKTGVQVAYVAIGIAASSDEHLGLLRQLTHVLSDDSVAEQLKSATTAEELRALLMGEKQSEQLKLDNEMLTLDIVASDLLTLQALNAARLKEAGAVDATFVTKAINEQPLNLGQGIWLSDSAEGNLRSAIAVSRAANAFDVDGETAAMLVSVAMNDDQPIAVLKRLADLLLDNKADRLLKADAATLLALLTSDDAPTDDVLSAEFVVRNEHGLHARPGNMLVNTIKHLPGYYGDNLDGRSKTCTTQSGGHKKTAPTTKRKKASCTCDNAHAGDIKQPAKQAVSCDITWHVASGKTPLSSCKRIQAFQSIMIMTMLDHTHEYLNAKLKCFMPSILNFKVLIFTTEKAQINEEIKKGELGNQESMSSKGACKGWARYPGPVNRNGRESRAFLQPDNSNKLLSVITTKQTQSRQYDEEAEGTRESKTITKNQDKRQNTTQHNKTTTQTATHTAHTTPTTSHPGQPAGDDATQRNERPPLTPHTNPHPQTAAPHTTRPPPRATRHHASRRAQRTQTPKPRTPTRHTSANNPRTQRTEWPTDSPQHTRANKDRRSQNRSQEKPASTRQPEQPQTPQPQTPDTSQHRTEKKDYHTATERDKHTDHTNTAPPAHPDEDHSVVV

SEQ ID NO: 60685 - protein, 240 aa, Homo sapiens
  DOMAIN (17)..(37): FLAGELLAR BIOSYNTHETIC PROTEIN FLIP SIGNATURE domain identified by eMATRIX, accession number PR00951A, p-value=3.925e- 12, raw score of 11.37
MATNKRTLSRIGFYCGLALFLIITLFPFFVMLMTSFKGAKEAISLHPTLLPQQWTLEHYVDIFNPMIFPFVDYFRNSLVVSVVSSVVAVFLGILGAYALSRLRFKGRMTINASFYTVYMFSGILLVVPLFKIITALGIYDTEMALIITMLLRQHPDEIRRSGDNGWLNRLANFFRIPGRAKSREIRVAKRIGGREHNWWGKSPGPDTTGGTHTPHHHCERRTNTKRRDYYAKSTAQREPE

SEQ ID NO: 60686 - protein, 896 aa, Homo sapiens; identical to SEQ ID NO: 54658
  DOMAIN (115)..(162): Acylphosphatase proteins domain identified by eMATRIX, accession number BL00150, p-value=6.906e-34, raw score of 25.33
  DOMAIN (112)..(197): Acylphosphatase domain identified by PFam, accession name Acylphosphatase, E-value=2.8e-05, PFam score of 19.0

SEQ ID NO: 60687 - protein, 773 aa, Homo sapiens
MVTDFADFGTTIKQDFRLLGQTSVDRLLQLSQGQAVKGNQLLPVSLVKRKTTLAPNTQTASPRALADSLMQLARQVSRLESGQDFADFRNHHQTGFSPAGANQRGPLAATLSGPGGEGQSAVARLTGEKKNHPGAQYANRLSPRVGRFINAAGTTGFPTGKRAVSATQLMDFADFGTTIKQDFRLLGQTSVDRLLQLSQGQAVKGNQLLPVSLVKRKTTLAPNTQTASPRALADSLMQLARQVSRLESGQDFADFGTTIKQDFRVLGQTSVDRLLQLSQGQAVKGNQLLPVSLVKRKTTLAPNTQTASPRALADSLMQLARQVSRLESGQDFADFGTTIKQDFRLLGQTSVDRLLQLSQGQAVKGNQLLPVSLVKRKTTLAPNTQTASPRALADSLMQLARQVSRLESGQDFADFGTTIKQDFRLLGQTSVDRLLQLSQGQAVKGNQLLPVSLVKRKTTLAPNTQTASPRALADSLMQLARQVSRLESGQDFADFGTTIKQDFRLLGQTSVDRLLQLSQGQAVKGNQLLPVSLVKRKTTLAPNTQTASPRALADSLMQLARQVSRLESGHPVTTIVFHKEQPPKWLPRFINSLPQATLQKYCYQKGILIHTPRDGSWMSCQKEFGETAMTMITNSSSVPQNAHAMYENDACAKALGIDIISMDEGFAVVTMTVTAQMLNGHQSCHGGQLFSLADTAFAYACNSQGLAAVASACTIDFLRPGFAGDTSPATAQVRHQGKQTGVYDIEIVNQQQKTVALFRGKSHRIGGTITGEA

SEQ ID NO: 60688 - protein, 758 aa, Homo sapiens
  DOMAIN (209)..(264): Sigma-54 interaction domain proteins ATP-binding region A proteins domain identified by eMATRIX, accession number BL00675B, p -value=1.000e-40, raw score of 24.07
  DOMAIN (157)..(354): Sigma-54 transcription factors domain identified by PFam, accession name sigma54, E-value=4.3e-123, PFam score of 422.3
MAKNAIAHVHCCANGRFWRAVMSHKAWQNAHAMYENDACAKALGIDIISMDEGFAVVTMTVTAQMLNGHQSCHGGQLFSLADTAFAYACNSQGLAAVASACTIDFLRPGFAGDTLTATAQVRHQGKQTGVYDIEIVTNNKKDPGPISVSFDYRGHRKEIFAQAIHNASPRNSKPVIAINCGAWPEQLLESELFVHARGAFTGAVSNREGLFQAAEGGTLFLDEIGDMPAPLQVKLLRVLQERKVRPLGSNRDIDINVRIISATHRDLPKAMARGEFREDLYYRLNVVSLKIPALAERTEDIPLLANHLLRQAAERHKPFVRAFSTDAMKRLMTASWPGNVRQLVNVIEQCVALTSSPVISDALVEQALEGENTALPTFVEARNQFELNYLRKLLQITKGNVTHAARMAGRNRTEFYKLLSRHELMQTISGGTAISSFRFSDIRLTITVIQSLITFGWHRRTRTHAARTAAHQHQFADALRPFKGERHRTMAPHRVAQQVDFGDIQLIHHAFQDSCIKIRSRTTINDRIALAPTRTIQQDHPIARLYQRIDIAAEVRPASSTRAGTMQQDNGFVALSAVIKMDAQRFTRFFYIQKTAGGGFGLWLITHHLLLHIQFSVLALNEPNPAIHSGIGRNSGKSGDPGFDFMCRLSGNGGKLFVTDGIQFLYASLLQQSHELVIPNRVERMQRSLILNNFSAALSPVLVRNGRYLRQPRMAKHLRNTSRQDLKYRLCRINHSYGVICRQRHPEKPNDVVGVSAG

SEQ ID NO: 60689 - protein, 405 aa, Homo sapiens
  DOMAIN (181)..(306): Molydopterin dinucleotide binding dom domain identified by PFam, accession name Molydop_binding, E-value=5.8e-37, PFam score of 136.2
MDKLGNGGKGISWNTQDEIDFLGKLNYTKRDGPAQGRPLIDTAIDASEVILALAPETNGHVAVKAWQALGEITGREHTHLALHKEDEKIRFRDIQAQPRKIISSPTWSGLESDHVSYNAGYTNVHELIPWRTLSGRQQLYQDHPWMRAFGESLVAYRPPIDTRSVSEMRQIPPNGFPEKALNFLTPHQKWGIHSTYSENLLMLTLSRGGPIVWISETDARELTIVDNDWVEVFNANGALTARAVVSQRVPPGMTMMYHAQERIMNIPGSEVTGMRGGIHNSVTRVCPKPTHILAVTRSWPGLKYYGTVDRTGRVYMTSDVNAWAMANGCVRVYSGLMDMMNDNEIEGVLGHELGHVALGHSLTAIRNRFAPGSFASFTRRRSIICCAVSLRSSSEQRDDVYHPQE

SEQ ID NO: 60690 - protein, 301 aa, Homo sapiens
  DOMAIN (119)..(206): ParB-like nuclease domain identified by PFam, accession name ParBc, E-value=1.7e-10, PFam score of 48.3
MVVAKSAIPLIKDSPDRFFDMLRDLLKNVDLKGFEPDVRILLTKYSNSNGSQSPWMEEQIRDAWGSMVLKNVVRETDEVGKGSIMSATDRYSHQLLYATVRQRGYRARIRNHVLRGDSVEKTSRVWSGNERDQELLTEDALDDLIPSFLLTGQQTPAFGRRVSGVIEIADGSRRRKAAALTESDYRVLVGELDDEQMAALSRLGNDYRPTSAYERGQRYASRLQNEFAGNISALADAENISRKIITRCINTAKLPKSVVALFSHPGELSARSGDALQKAFTDKEELLKQQASNLHEQKKLG

SEQ ID NO: 60691 - protein, 954 aa, Homo sapiens; identical to SEQ ID NO: 46296
  DOMAIN (602)..(617): ADRENODOXIN REDUCTASE FAMILY SIGNATURE domain identified by eMATRIX, accession number PR00419D, p-value=1.000e-10, raw score of 10.62
  DOMAIN (574)..(727): Pyridine nucleotide-disulphide oxidoreducta domain identified by PFam, accession name pyr_redox, E-value=6.3e-21, PFam score of 73.5

SEQ ID NO: 60692 - protein, 258 aa, Homo sapiens
  DOMAIN (148)..(189): Bacterial regulatory proteins gntR family proteins. domain identified by eMATRIX, accession number BL00043, p-value=7.107e-28, raw score of 22.96
  DOMAIN (129)..(188): Bacterial regulatory proteins, gntR family domain identified by PFam, accession name gntR, E-value=3.7e-32, PFam score of 109.0
  misc_feature (1)...(258): Xaa = X or * as defined in Table 2
XGQPALADTGAASRFCLASAAEDETLRLKMKAIVARGAGTVIVTLGENASIAWDGAQFWRQAPEPVTVIDTMGAGDSFIAGFLCGWSAGMTLPQAIAQGTACAAKTIQYHGSIMSATDRYSHQLLYATVRQRLLDDIAQGVYQAGQQIPTENELCTQYNVSRITIRKAISDLVADGVLIRWQGKGTFVQSQKVENALLTVSGFTDFGVSQGKATKEKVIEQERVSAAPFCEKLNIPGNSEVFHLCRVMYLDKDPRVYS

SEQ ID NO: 60693 - protein, 260 aa, Homo sapiens
  DOMAIN (1)..(54): Site-specific recombinases domain identified by PFam, accession name recombinase, E-value=2.2e-17, PFam score of 66.3
MMMQVISAVAEFERDLLLERTHSGIVRARGAGKRFGRPPVLNEEQKQVAPERIKSGPHNIVKCDVFDGVFRVNSSVNGDCVSMLNHCHGVGISPNTDSMRVCTCACSSAGHLPFSLGKEDGSGDRGDGPFRLGGHGPSFPLKGITEQQKEGLEIVKMVMISLEEGTFVVCRVQERCVDRTILHRFSSRSRNGVHDPKSVGRLRRTVKNTYFVKLFSHVGIEELNSVGGVLKVTHPYNRKGLTLFRSSGFEEVKPFKVASP

SEQ ID NO: 60694 - protein, 131 aa, Homo sapiens
  DOMAIN (31)..(72): Site-specific recombinases proteins domain identified by eMATRIX, accession number BL00397C, p-value=2.350e-24, raw score of 19.42
  DOMAIN (1)..(108): Site-specific recombinases domain identified by PFam, accession name recombinase, E-value=4.2e-33, PFam score of 122.6
MDIRKPVDHLPETGIRGHCLALGGIDLTSPTRKMMMQVISAVAEFERDLLLERTHSGIVRARGAGKRFGRPPVLNEEQKQVVFERIKSGVSISAIAREFKTSRQTILRAKAKLQTPDIIKIIFGGDALPFS

SEQ ID NO: 60695 - protein, 279 aa, Homo sapiens
  DOMAIN (109)..(150): Site-specific recombinases proteins domain identified by eMATRIX, accession number BL00397C, p-value=3.829e-26, raw score of 19.42
  DOMAIN (5)..(165): Site-specific recombinases domain identified by PFam, accession name recombinase, E-value=1.3e-66, PFam score of 234.7
MSRIFAYCRISTLDQTTENQRREIESAGFKIKPQQIIEEHISGSAATSERPGFNRLLARLKCGDQLIVTKLDRLGCNAMDIRKTVEQLTETGIRVHCLALGGIDLTSPTGKMMMQVISAVAEFERDLLLERTHSGIVRARGAGKRFGRPPVLNEEQKQAVFERIKSGAVLLLVVYTLMAAEARVAPKGFLATLTLIKCLLGVNSQVLVEMGTEDKSFATHITGSSHLLAHLLRYELELYTAYSLKVKPRGFADGRKELVVGGKWKTQKATPKATFRANS

SEQ ID NO: 60696 - protein, 314 aa, Homo sapiens
  DOMAIN (115)..(311): Sodium:sulfate symporter transmembrane domain identified by PFam, accession name Na_sulph_symp, E-value=4e-94, PFam score of 326.1
MVHDGQFAACWEISQGYEMPIGLYRDLAVGVAEDCQTIAGRGFHAVNGDIDFHHLDPDAAFSGKLMQRLLIFQQRPTGTVPYPDALSMNHHPQRVTPVRQPEYFRVPNGRTDENREKMLLGVFVLALLGWIFSKSLGVDESTVAIVVMATMLLLGIVTWEDVVKNKGGWNTLIWYGGIIGLSSLLSKVKFFEWLAEVFKNNLAFDGHGNVAFFVIIFLSIIVRYFFASGSAYIVAMLPVFAMLANVSGAPLMLTALALLFSNSYGGMVTHYGGAAGPVIFGVGYNDIKSWRLVGRVLTILTFLVHITLGEWPLH

SEQ ID NO: 60697 - protein, 674 aa, Homo sapiens
  DOMAIN (419)..(439): w LOW TRANSPOSASE SAPA 12K domain identified by eMATRIX, accession number DM00475B, p-value=1.419e-11, raw score of 12.12
  DOMAIN (467)..(638): Sodium:sulfate symporter transmembrane domain identified by PFam, accession name Na_sulph_symp, E-value=2e-77, PFam score of 270.6
MNCRFNKHFSLLLRKPAGIKRHTDATGTVNRGRYVLKCRSRRKLTLYICCGKYGKLWGKVGIRGEAGMFPGSNDSQAGTELIFNAGECLHQLAALNSRLNCAQEMARRDSIGEVPPVPWRTVVGSGIAGEAKLDHLRLVSLGMRCWQDIEHYGLRIWFTDPDTGSILHLSRSWPRSEQENSPAATRRLFSFQAGALAGGQIVSQAAKRSADGELLLATRNRLSSVVPLSPDAWQMLSAPLRQPGIVALREYLRQRPPACIRPLNQVDNLFILPVAECISLGWDSSRQTLDAQVISGEGEDNVLTLSLPASASAPYAVERMAALLQQTDDPVCLVSGFVSFVEGQLTLEPRVMMTKTRAWALDAETTPVAPLPSASILHSALFAIKFHSRLSLTINLYAWIKKYGPDSSTNKEQSDAQAEIRRLQKELKRVTDERDILKKAAVDSICQCNTPFNYLFRCFELQCLSRWGGWALAAGLPGIIMLLVTPAGPMKIREKMLLGVFVLALLGWIFSKSLGVDESTVAIVVMATMLLLGIVTWEDVVKNKGGWNTLIWYGGIIGLSSLLSKVKFFEWLAEVFKNNLAFDGHGNVAFFVIIFLSIIVRYFFASGSAYIVAMLPVFAMLANVSGAPLMLTALALLFPTPMAAWLLTMAARQVRSSLAWVITILNPGGWSVRY

SEQ ID NO: 60698 - protein, 818 aa, Homo sapiens
  DOMAIN (681)..(695): ISOLEUCYL-TRNA SYNTHETASE SIGNATURE domain identified by eMATRIX, accession number PR00984D, p-value=1.000e-16, raw score of 12.85
  DOMAIN (397)..(818): tRNA synthetases class I (I, L, M and V) domain identified by PFam, accession name tRNA-synt_1, E-value=9e-33, PFam score of 122.3
MRWILFILFCLLGAPAHAVSIPGVTTTTTTDSTTEPAPEPDIEQKKAAYGALADVLDNDTSRKELIDQLRTVAATPPAEPVPKIVPPTLVEEQTVLQKVTEVSRHYGEALSARFGQLYRNITGSVCNCIATCVIVLAPGSQCCSTSPASVHLLLVKTAVHNHPTNSCNCQSCLFGAQVVCASIVRCTHLACAMAKLCATWPCRYFTHWYVALVGPNPLDSKHPKPIHPAPFDKHKNTPLYLTQTCGRSLQDLQGSAPGDPESATITQSAFLPPDPCNIGAAHCGCPLHWLRLIITSSLPAHPCCLAVHIRHTLAINGHTGKHQALTTPGLTRDRLYRELWSKGTTGRISDLNKTQSLVAPYPTLGEDIRNGRKRKAVCSSRLPIMWPHTQRIQLRDPIQAAWYSPLPFKWPHAHGLHLVSRILVARLSPPSHQRGHTTQRLPLASPLQCPFGHLPRPIHRGNTINGSSIGESPHNGPREFGRSHDPADTQPARAPPHRARQTPPHNSGTQPAPSRHHQVQQRAHSRQYGAPQQQTQCDAPHTHLRPHPTPVQCFAGRIRAAGVAKRRVIFRATPQWFVSMDQKGLRAQSLKEIKGVQWIPDWGQARIESMVANRPDWCISRQRTWGVPMSLFVHKDTEELHPRTLELMEEVAKRVEVDGIQAWWDLDAKEILGDEADQYVKVPDTLDVWFDSGSTHSSVVDVRPEFAGHAADMYLEGSDQHRGWFMSSLMISTAMKGKAPYRQVLTHGFTVDGQGRKMSKSIGNTVSPQDVMNKLGADILRLWVASNDYTGEIAGSDENLKRACHYNACSISLARRRH

SEQ ID NO: 60699 - protein, 377 aa, Homo sapiens
MRWILFILFCLLGAPAHAVSIPGVTTTTTTDSTTEPAPEPDIEQKKAAYGALAGLCWDNGHLALRTVAATPPAEPVPKIVPPTLVEEQTVLQKVTEVSRHYGEALSARFGQLYRNITGSPHKPFNPQTFSNALTHFSMRASTASEMTLIHAYENVPMYRRKFDAAAYIVMISGNFQTCDLRDNYPFDTFAVPMEQVVRIHASSGTTGKPTVVGYTQNDIDNWANIVARSLRAAGGSPKDKIHVAYGYGLFTGGLGAHYGAERLGATVIPMSGGQTEKQAQLIRDFQPDMIMVTPSYCLNLIEELERQLGGDASGCSLRVGVFGAEPWTQAMRKEIERRLGITALDIYGLSEADGAGGGDGVSGNYRRPNHLGRSFLS

SEQ ID NO: 60700 - protein, 1524 aa, Homo sapiens
  DOMAIN (1)..(44): AIR carboxylase domain identified by eMATRIX, accession number PF00731C, p-value=9.027e-29, raw score of 23.16
  DOMAIN (1)..(80): AIR carboxylase domain identified by PFam, accession name AIRC, E-value=5.9e-10, PFam score of 33.0
  misc_feature (1)...(1524): Xaa = X or * as defined in Table 2
MLAAKTTVPVLGVPVASRHLQGVDSLHSIVQMPKGIPVATFAIGTAGAANAALFAVAMLATGNVALLAKLDAFRAKQTAAAQAMSEELRMFVHAAQALGYRCIVLDPDAISPAGAVAEKHVRADYLDSFGLAQMARDCDAITTEFENDRAVEKAHFEAAGVPCAPHAVITNEIELAAVDPGLLPGILKTSRMGYDGKGQRRRAGPGLGRPGARALRAGAAAAAEVRAQRAGGARRRRPDRQLPRAAEPAPRRHPGRHRGPGPRCAGRGREAGRRCRAPGGPGLNYVGVLSIELGLMEEISYDASDLSGQNITIDADYAWLESLRPKTLPLAFAAIIVGTALAWWQGHFDPLVALLALITAGLLQILSNLANDYGDAVKGSDKPDRIGPLRGMQKGVITQQEMKRALIITVVLICLSGLALVAVACHTLADFVGFLILGGLSIIAAIPTPWAIVLMVISVWAHTLIPALILPATACGLLATAVLNINNLRDINSDRENGKNTLVVRLGEVNARRYHACLLMGSLQARYVMREMDPVAMQTNAGTYCQGSVRPFALRATSFMVAAVSCFFAFHSSAPVDLGKRSTAVHHMPVPEPEPDREPTVSRLPVGWRGSDYAVVAGTMARADCYDLPHAQSHGWSTAVAASFAAQPAPVRQRRRSLYRATFATEDVPDGAFAAPLRPVYPHARHDRRPGCKAERNALPSENRQKTARRPRPVMQPASHPGNGDLSPAFVYQSKSARRRDVLLPVAVPAPLCGWWYRGRYEKWARRGTTARASVQARIVLVNQLGTSSLMDVIRKELQSLLREPQTRAILILPVLIQVILFPFAATLEVTNATIAIYDEDNGEHSVELTQRFARASAFTHVLLLKSPQEIRPTIDTQKALLLVRFPADFSRKLDTFQTAPLQLILDGRNSNSAQIAANYLQQIVKNYQQELLEGKPKPNNSELVVRNWYNPNLDYKWFVVPSLIAMITTIGVMIVTSLSVAREREQGTLDQLLVSPLTTWQIFIGKAVPALIVATFQATIVLAIGIWAYQIPFAGSLALFYFTMVIYGLSLDGVDQDDTRSRVDQQAVANNLHREVLRKVRTPDNHPGHQQHENHAHDRPEHHLLPGVVLTDIRHFMLIAFQYFDNVQQPRNIFLIRDVVMHKTHKHKHQCDENRNAEERVQNASHLRRTEGLRQPLQRREEERNPGQRHQEEANHHGPVTGAINKFGAHNHFRLTHDDPPRHRPLPYSGQYRCSGKSTRQNGNKASRCQRFQRAFPQAYRGVDLRIFRQTVIQLRLIGVMQHVHNVRTTDPFRVVDASMFVTTRFQFRHALFRQLQHLLLERAFIYPVILFVEARNIKRTPGNAVTTADAVFRLEIDNPVSVLNDCTSRRARLQAAGIFTVHTAVFTDQPLQLAVLFGFAKAHHRPGLGAQIGGVIVNPDAVPHSSRRSFHSNTPLTGFTAIQPQWIGIPTVSTADHYIQRFQTTRYHSHRADKATLAGDSDTIAIINAFRRRQRFADFHKLFRLSNCVEQCVLGPGVEVLX

SEQ ID NO: 60701 - protein, 228 aa, Homo sapiens
  misc_feature (1)...(228): Xaa = X or * as defined in Table 2
XAPLRLGNRGRYEKWARRGTTARRLFKLFGAQPHGDQRGRCGAKNNRDLLAVRTIHRQVAGMIAPAFLLLVGAVVLFINDNHARFLNGVNSAERCRSQSPGSPPPCPSFPEAQNSDYTQKPYRRGMMSQPAKVLLLYAHRNLRTRWQTGYCLNRPRAQQCYRARPLRALSRFFIDIPRPDGPNQQVVVCPLSVPVLNINWFVATKASPFGKSLVWLLNNGNYKAPPNF

SEQ ID NO: 60702 - protein, 1507 aa, Homo sapiens
  DOMAIN (1474)..(1490): LMW PHOSPHOTYROSINE PROTEIN PHOSPHATASE SIGNATURE domain identified by eMATRIX, accession number PR00719E, p-value=3.455e- 14, raw score of 13.59
  DOMAIN (1)..(98): Family 4 glycosyl hydrolase domain identified by PFam, accession name Glyco_hydro_4, E-value=1.1e-48, PFam score of 175.2
MTEVCPDATMLNYVNPMAMNTWAMYARYPHIKQVGLCHSVQGTAEELARDLNIDPATLRYRCAGINHMAFYLELERKTADGSYVNLYPELLAAYEAGQHRRIASLEDLGPSFCAWQRTNSGEFGGAGELLGEEQSGSMETIGFSLYMELLENAVDALKAGREPSLEDLTSQQTEVELRMPSLLPDDFIPDVNTRLSFYKRIASAKTENELEEIKVELIDRFGLLPDPARTLLDIARLRQQAQKLGIRKPGRKNCSQTRKLTLTIVVRRCQEREEAKAMSEHDMLPSEPVTIVLSQMGWVRSAKGHDIDAPGLNYKAGDSFKAAVKGKSNQPVVFVDSTGRSYAIDPITLPSARGQGEPLTGKLTLPPGATVDHMLMESDDQKLLMASDAGYGFVCTFNDLVARNRAGKALITLPENAHVMPPVVIEDASDMLLAITQAGRMLMFPVSDLPQLSKGKGNKIINIPSAEAARGEDGLAQLYVLPPQSTLTIHVGKRKIKLRPEELQKVTGERGRRGTLMRGLQRIDRVEIDSPRRASSVVIRQRIQPPETIKFPVPERRTDSHCKNRNNHATVQNFDDLNSPLFTAAFCCGEAVVRFSGMGYMVNPRQLTPALKLDADWIGLLGAGTLAGLFVGTSLFGYISDKVGRRKMFLIDIIAIGVISVATMFVSSPVELLVMRVLIGIVIGADYPIATSMITEFSSTRQRAFSISFIAAMWPGTWPATDNLVLTKSFWRCQRHGTAEWLPVDSVMSTQRFRAQPTLNARRHIQPNQQDHHERQTERERCQRSTQIQTLSDQRADDWGQCTAQCANVVGKAQARCTLVGIEITANQFCICWKNSNRPSTQTFAPPIANTGIISSCEASRLQTYALRVPSQSPRKPPTQHPTAAPKPLKNSTLATPKNSDDRGILQVTGEAEPQRSSRRQCHYDMSVSIMAPYVNRVCATAATASRSAPLRRYTTGLQGASQTVSKNFSNNARANGTAAFTDCETQTVVHRDRVDQGNNHFDVVARHYHLYAFRQFDGTSHVSSTEVELRTVAFEERSMTAAFIFGQNVHFRFELGVRLDGARLSQYLTTFDFFTFDTTQQNTYVLTSTAFVQQFAEHFNASTGRLLSLFDTNDFNFFTNFDDTAFYTTGNNGTTTGDGEYVFDRQQNGCQSHALFRYRSGAPQSVPDHPDARWLLPDPIETLKAAETLVQQGFVVLPYCGADPVLCKRLEEVGCAAVMPLGAPIGSNQGLETRAMLEIIIQQATVPVVVDAGIGVPSHAAQALEMGADAVLVNTAIAVADDPVNMAKAFRLAVEAGLLALRTGQPQLFCSCHQPADRISGGIGMKTFSDRWRQLDWDDIRLRINGKTAADVERALNASQLTRDDMMALLSPAASGYLEQLAQTGAASDPSAIGQTQLVSTSRFIFPIFALTTAQHQLSLEGHCARQISRRLCRNYDLILTMEKRHIERLCEMAPEMRGKVILFGHWDNECEIPDPYRKSRETFTAVYTLLERSARQWAQALNAEQ

SEQ ID NO: 60703 - protein, 819 aa, Homo sapiens
  DOMAIN (362)..(382): w LOW TRANSPOSASE SAPA 12K domain identified by eMATRIX, accession number DM00475B, p-value=1.300e-15, raw score of 12.12
  DOMAIN (295)..(388): Transposase domain identified by PFam, accession name Transposase_8, E-value=3.2e-38, PFam score of 140.4
MRVNTFVQHHMEETLKAFHVTGHHILIARHGLGVGKENTEHAANVVNDQRNSGFFCRFQQTFCQTCCQLIQRFVNARLRDFIQTGETRCHRNRVTGKRTRLIDRTRRGQRIHYITTTTECAYRHSTADDFAEAASATRKPVITSSMISNAPNSSHSARRPGRNSGSGGTQFILPATGSTIIQAISCGYCSNAARTEARSLISYRLKYIWRNLRKARELGWLKKQHRRRSNRDNKKQRGKNKKEEDHGAEQNRQGEQRKRRATREEKERAETPLVCCSLVIGEQMIDVLGPEKRRRRTTQEKIAIVQQSFEPGMTVSLVARQHGVAASQLFLWRKQYQEGSLTAVAAGEQVVPASELAAAMKQIKELQRLLGKKTMENELLKEAVEYGRAKKWIAHAPLLPGDGERTDDWMDGRRSRHTDDTDVLLRIHHVIGELPTYGYRRVWALLRRQAELDGMPAINAKRVYRIMRQNALLLERKPAVPPSKRAHTGRVAVKESNQRWCSDGFEFCCDNGERLRVTFALDCCDREALHWAVTTGGFNSETVQSFACCRQTPVLAGPLNTAGTKNFWRKRCYWVVILFYSLWWLAPCVSVWPVSDLVHSCVREVVWKGGKSVSFGDRPRLKWVDWGQQPQSFGYILDPFSEGTFGLGFAERQYAHDTQYFLPVLAQFAIGIRMTMSYKLHTGTRFYVELCGSLAGMLPLILPFIVQEHQIGQPSTQKSTFMRTTIQWPHGTDRICVIVGGREQRSWDLALEFSAALSQWKATQGRTQPTPTDGTFRPDQGKLEGQNHPSGQNLRSSSIGLPNLAIDYKQKHTLCGLCD

SEQ ID NO: 60704 - protein, 617 aa, Homo sapiens
  DOMAIN (90)..(132): FecCD transport family domain identified by eMATRIX, accession number PF01032A, p-value=6.760e-23, raw score of 14.01
  DOMAIN (219)..(416): Aminotransferases class-III pyridoxal- domain identified by PFam, accession name aminotran_3, E-value=1.2e-76, PFam score of 222.0
  misc_feature (1)...(617): Xaa = X or * as defined in Table 2
MDALMATPLWQAMPFVRAGRFQRVPAVWFYGATLSAMHFVRVLDNAIGVIVATALTWMNFSQALPRSQWAQAAWSPDIDVIEQMIFHYSLLPRLAISLLVGAGLGLVGVLFQQVLRNPLAEPTTLGVATGAQLGITVTTLWAIPGAMASQFAAQAGACVVGLIVFGVAWGKRLSPEPSMSKSENLYSAARELIPGGVNSPVRAFTGVGGTPLFIEKADGAYLYDVDGKAYIDYVGSWGPMVLGHNHPAIRNAVIEAAERGLSFGAPTEMEVKMAQLVTELVPTMDMVRMVNSGTEATMSAIRLARGFTGRDKIIKFEGCYHGHADCLLVKAGSGALTLGQPNSPGVPADFAKYTLTCTYNDLASVRAAFEQYPQEIACIIVEPVAGNMNCVPPLPEFLPGLRALCDEFGAVLIIDEXRFREHACRSTLEDPQAEFAAEGLEIKKKWMEEEQAGKNKLSGKQLLETDPNLDTSDIQFLEDAGNNVQTSCDRLRELHVSEVFTVITETRETKGPRDTPIFIETLVKVKDAEDQLGARVGYIELDLNSGKILESFRPEERFPMMSTFKVLLCGAVLSRIDAGQEQLGRRIHYSQNDLVEYSPVTEKHLTDGMTVDSRGSP

SEQ ID NO: 60705 - protein, 447 aa, Homo sapiens
  DOMAIN (250)..(297): kw SKI2W SKI2 NUCLEOLAR HELICASE domain identified by eMATRIX, accession number DM01537B, p-value=6.131e-10, raw score of 21.63
  DOMAIN (235)..(323): Helicases conserved C-terminal domain identified by PFam, accession name helicase_C, E-value=2.1e-07, PFam score of 38.0
MEDNHKLARHRTRDRPERSDGNPQLRACSNAKRRRLRQRVTQHLLKQHAHQPQTRAHQQRNRQTRQQAVVKNHLLDDVNIRRPGSLRPLATRQRLREVHPVPVRQHKSNQISECGREIEIRSDAHLLPNDVKLKIRPLIVDEEHRFGCVIKSALKRCARTWIFLTLTATPIPRTLNMAMSGMRDLSIIATPPARRLAVKTFVREYDSMVVREAILREILRGGQVYYLYNDVENIQKAAERLAELVPEARIAIGHGQMRERELERVMNDFHHQRFNVLVCTTIIETGIDIPTANTIIIERADHFGLGAAAPVTRAYAWLLTRHPKAMPPDAQKRLEAIASLEDLGAGFALATHDLEIRGAGELLGEEQSGSMETIGFSLYMELLENAVDALKAGREPSLEDLTSQQTEVELRMPSLLPDDFIPDVNTRLSFYKRIASAKTENELEEIK

SEQ ID NO: 60706 - protein, 49 aa, Homo sapiens
ALFADPDILLLDEPTNNLDIDTIRWLEQVLNERDSTMIIISHDRHFLNM

SEQ ID NO: 60707 - protein, 544 aa, Homo sapiens
  DOMAIN (332)..(343): DNAJ PROTEIN FAMILY SIGNATURE domain identified by eMATRIX, accession number PR00625D, p-value=2.846e-09, raw score of 11.93
MGLPSGYSAGYSYEYFGGNATYMIIPEIAINLGCVLPYHGSYFAAASLAEPMCCIIGAYHANYHTTQYVYEHRMGVKPGGNIALLACAGPMGIGAIDYAINGGIQPSRVVVVDIDDKRLAQVQKLLPVELAASKGIELVYVNTKRMSDPVQMLRALTGECRFDDIFCYAAHIAALGRPDFSSKIKLYTGEIPLFSHYQIESQIESAFQREVRLPSGGSIVIDSTEALTAIDINSARATRGGDIEETAFNTNLEAADEIARQLRLRDLGGLIVIDFIDMTPVRHQRAVENRLREAVRQDRARIQISHISRFGLLEMSRQRLSPSLGESSHHVCPRCSGTGTVRDNESLSLSILRLIEEEALEENTQEVHAIWFPGKTYEFELGTPESIKQQVDASRSMVIGHTGDKIFDSITSNAVAEPDGSASETNLFAMLDSAIAALKTPVADSEADKETAAAALDKTNRGLKNSLNNVLTVRAELGTQLNELESLDSLGSDRALGQTQQMSDLVDVDWNATISSYIMQQTALQASYKAFTDMQGLSLFQLSK

SEQ ID NO: 60708 - protein, 590 aa, Homo sapiens
  DOMAIN (321)..(437): Bacterial flagellin N-terminus domain identified by PFam, accession name Flagellin_N, E-value=5.5e-12, PFam score of 53.3
  misc_feature (1)...(590): Xaa = X or * as defined in Table 2
MMIMCAVILVQHLFQPANGVDVEVVGRFVEQENIRISKQRLRQKHTQLPARSNFTHRAVVLFHWNSHAKQQFTGASFRRVTGHFAVFNFQIGHFIAVFFTHFRQSIDAVALLLHFPQLFMPHDHRIQHSELFKGKLVLDAVYQWRSLGSREPLPSVGSRSPPRIFIKVDFPLPFAPIKAVTVAAAKFDGNVFKQRLTAELHAAFAVVGFCSTASAVTYPLPTDGSRLVGQNQVITIPEGNTQPLEYFAAEYQMGLSNMMEANPGVDTFLPKGGTVLNIPQQLILPDTVHDGIVINSAEMRLYYYPEGTNTVNVLPFGIGQLAKIPLQLTTKLAYKHGYDLAEPCHTKAPGQQSTTAIQNAQEKIVYASNGTLSDDDRASLATDIQGLRDQLLNLANTTDGNGRYIFAGYKTETAPFSEEKGKYVGGAESIKQQVDASRSMVIGHTGDKIFDSITSNAVAEPDGSASETNLFAMLDSAIAALKTPVADSERXKETAAAALDKTNRGLKNSLNNVLTVRAELGTQLNELESLDSLGSDRALGQTQQMSDLVDVDWNSTISSYIMQATALQASYKALPICRIVALSAQQIISA

SEQ ID NO: 60709 - protein, 161 aa, Homo sapiens
  DOMAIN (115)..(130): BACTERIAL SENSOR PROTEIN C-TERMINAL SIGNATURE domain identified by eMATRIX, accession number PR00344A, p-value=1.818e- 11, raw score of 11.50
  DOMAIN (1)..(159): Histidine kinase domain identified by PFam, accession name signal, E-value=4.6e-05, PFam score of -0.7
MSDNLSAAESQALNRDISQLEALIEELLTYARLDRPQNELHLSEPDLPLWLSTHLADIQAVTPDKTVRIKTLVQGHYAALDMRLMERVLDNLLNNALRYCHSTVETSLLLSGNRATLIVEDDGPGIAPENREHIFEPFVRLDPSRDRSTGAAGWGWQLSTL

SEQ ID NO: 60710 - protein, 415 aa, Homo sapiens
  DOMAIN (302)..(327): EPSP synthase proteins domain identified by eMATRIX, accession number BL00104D, p-value=1.429e-22, raw score of 15.17
  DOMAIN (295)..(413): EPSP synthase domain identified by PFam, accession name EPSP_syntase, E-value=7.5e-55, PFam score of 195.7
MVSYIKRARSMRDIRNEKGTAKPDPAVMKRLIQLGLPIALALFFEVTLFAVVALLVSPLGIVDVAGHQIALNFSSLMFVLPMSLAAAVTIRVGYRLGQGSTLDAQTAARTGLMVGVCMATLTAIFTVSLREQIALLYNDNPEVVTLAAHLMLLAAVYQISDSIQVIGSGILRGYKDTRSIFYITFTAYWVLGLPSGYILALTDLVVEPMGQQASDSLLLPTTLHWIKMKTIEVDDELYSYIASHTKHIGESASDILRRMLKFSAASQPAAPVTKEVRVASPAIVEAKPVKTIKDKVRAMRAGGNVDVDGSVSSQFLTALLMTAPLAPEDTVIRIKGDLVSKPYIDITLNLMKTFGVEIENQHYQQFVVKGGQSYQSPGTYLVEGDASSASYFLAAAAIKGGTVKVTGIGRNSMPG

SEQ ID NO: 60711 - protein, 151 aa, Homo sapiens
  misc_feature (1)...(151): Xaa = X or * as defined in Table 2
XRFSEISPTCRTDPLQRTAKRSAVKIQGQNFTLRQMPFQLQRAPELANFAAKCFGVRIKQTSNLHSERAATGNNPSRSEILPCCARHREWIHPRMLPEPAIFIIDQRFKVTWRNIFDCYRITPDAVSIGEAPERRTILRHDHSCGIDFMQR

SEQ ID NO: 60712 - protein, 277 aa, Homo sapiens
MITLFTINLGVSPWLKSFRRLTGGQRIGSWEGGPTNTPGLTGGAGKPRGKNTAHKQVKNPYTGYKEETPTIHTDLHRKQETTTNNVTPVKLEGAVRITDSATLTLGNGVDTTLADLTAASRGSVWLNSNNSCAGTSNCEYRVNSLLLNDGDVYLSAQTAAPATTNGIYNTLTIAVPSFSTTCRLPEDIIVVSAFPPLLIFCVPLLILVCPDWESRPSEAHTQVNGGVELHCIEAPTGFDTLMASRLRMVRVGIVERMNNVAHKDTSYGPWITELRAR

SEQ ID NO: 60713 - protein, 543 aa, Homo sapiens
  DOMAIN (2)..(18): CYTOSOL AMINOPEPTIDASE SIGNATURE domain identified by eMATRIX, accession number PR00481E, p-value=5.500e-13, raw score of 5.86
  DOMAIN (348)..(416): HAMP domain identified by PFam, accession name DUF5, E-value= 4.1e-13, PFam score of 57.0
  misc_feature (1)...(543): Xaa = X or * as defined in Table 2
MIIDLATLTGAAKTALGNDYHALFSFDDALAGRLLARERTVLASAAGGVPPQLLPSNFAELNNTGSAAYPAGASTAAGFLSHFVENYQQGWLHIDCSATYRKAPVEQWSAGATGLGRAVVEDSALDLQHWEKEDGTSVIPFFTSLEALQQAVEDEQAFVVMPVRTLFEMTLGETLFLNAKLPTGKEFMPREISLLIGEEGNPLSSQEILEGGESLILSEVAEPPAQMIDSLTTLFKTIKPVKRAFICSIKENEEAQPNLLIGIEADGDIEEIIQATGSVATHTLPGDEPIDICQYGARSTLQNPADPESSVMYVAAPIMDGSRLIGVLSVGKPNAAMAPVIKRSERRILWASAILLGIALVIGAGMVWWINRSIARLTRYADSVTDNKPVPLPDLGSRELRKLAQALESMRVKLEGKNYIEQYVYALTHELKSPLAAIRGAAEILRQXVHRLLHDGASAALAETLGSMAGFMMTRDGQCVVGTELNATHHRPVSEGKVRGVCQPLHLGRQNQSWEIVVSMNRGGVAALVGWVRQFWDEPDRIR

SEQ ID NO: 60714 - protein, 1606 aa, Homo sapiens
  DOMAIN (108)..(143): Phosphorylase pyridoxal-phosphate attachment site proteins domain identified by eMATRIX, accession number BL00102G, p-value= 6.538e-33, raw score of 14.65
  DOMAIN (46)..(200): Carbohydrate phosphorylases domain identified by PFam, accession name phosphorylase, E-value=3.1e-114, PFam score of 371.0
MGGPFPCNGKTLSDRWTRSKERNRRRTTATDEDVIYLYQYMVPPTCNPALAALLDKSLQKEWANDLDQLINLEKFADDAKFRQQYREIKQANKVRLAEFVKVRTGIEINPQAIFDIQIKRLHEYKRQHLNLLHILALYKEIRENPQADRVPRVFLFGAKAAPGYYLAKNIIFAINKVADVINNDPLVGDKLKVVFLPDYCGPLLGTLEYGLPHKNLIEGIAAAMHFRSEDDPQAQELAALIADKGPQAALAQISGLDANSEVVSEAATMEQTQAFENRVLERLNAGKTVRSFLITAVELLTEAVNLLVLQVFRKDDYAVKYAVEPLLDGDGPLGDLSVRLKLIYGLGVINRQEYEDAELLMALREELNHDGNEYAFTDDAILGPFGELHCVAALPPPPQFEPADSTALQTGTCVGTQTLFPALGLIQRGTQENSSMTDAAHYLRSDRFSRRCPIGTIAESTARPTISWETNVRDTTSYAGPVLMGQTVLKRSVGLLTYFHTGPKSCIRRLRPEVSSDPGPGTAWETGMSRTSFCLRGKHGGIWGSLGTHPPCAVPGDLRVGGCHRIRLQTRMLLGIEGEPWLPRGPHGRAAGNPVDQQFAAGDLGLLTDADAHLEGWGPEKTVPGVTEEGGGTLTVNDNGKATDIVQNSGAALQTSTANGIEISGTHQYGTFSISGNLATNMLLENGGNLLVLAGTEARDSTVGKGGAMQNLGQDSATKVNSGGQYTLGRSKDEFQALARAEDLQVAGGTAIVYAGTLADASVSGATGSLSLMTPRDNVTPVKLEGAVRITDSATLTLGNGVDTTLADLTAASRGSVWLNSNNSCAGTSNCEYRVNSLLLNDGDVYLSAQTAAPATTNGIYNTLTTNELSGSGNFYLHTNVAGSRGDQLVVNNNATGNFKIFVQDTGVSPQSDDAMTLGEGMLRLRWAIPAVSVDLGTYEYVLKSDGTSNWTLTNDVKPNPDPIPNPKPDPKPDPKPDPNPKPDPTPDPTPTPVPEKRITPSTAAVLNMAATLPLVFDAELNSIRERLNIMKASPNNNNVWGATYNTRNNVTTDAGAGYEQTLTGMTVGIDSRNDIPEGITTLGAFMGYSHSHISFDRGGHGSVGSYSLGGYASWEHESGFYLDGVVKLNRFKSNVAGKMSSGGAANGSYHSNGLGGHIETGMRFTDGNWNLTPYASLTGFTADNPEYHLSNGMKSKSVDTRSIYRELGATLSYNMRLGNGMEVEPWLKAAVRKEFVDDNRVKVNSDGNFVNYLSGRRGIYQAAGYPIHRILRTILCPFRADKRQRQPAMVAVVQVNFSRRRVYRVHLALHLRHRQAARCQPAAAFLTHPVSQDFTFQPVEHLHQHRREHHTATVFATGLLKGIRQAAALRFRQLTGGGFNPDEWREAPRLINRLDAGSVDKYRGQAVAVPAVPERHTGSLNDEWMMAGDLIVASPGVALAHPSLSADADAGIEIVGDIELFCREAQAPIVAITGSNGKSTVTTLVGEMAKAAGVNVGVGGNIGLPALMLLDDECELYVLELSSFQLETTSSLQAVAATILNVTEDHMDRYPIGLQQYRAAKLRIYENAKVSVVNADDALTMPIRVEWVLRFTEFMAKPDGYCLKT

SEQ ID NO: 60715 - protein, 469 aa, Homo sapiens
  DOMAIN (186)..(205): Signal carboxyl-terminal domain proteins domain identified by eMATRIX, accession number PF00512, p-value=2.895e-11, raw score of 13.94
  DOMAIN (188)..(360): Histidine kinase domain identified by PFam, accession name signal, E-value=8e-32, PFam score of 119.2
MQQASIKHIEFRDDRFVAAVAVDEYQPVTLVYLARAVTPGTYQRGEQINSGLYRCMKSIPHEWSWRRMVRRSGASPMLTASGVIRANTELRQMASQVIQADSESTNILWASAILLGIALVIGAGMVWWINRSIARLTRYADSVTDNKPVPLPDLGSSELRKLAQALESMRVKLEGKNYIEQYVYALTHELKSPLAAIRGAAEILREGPPPEVVARFTDNILTQNARMQALVETLLRQARLENRQEVVLTAVDVAALFRRVSEARTVQLAEKKITLHVTPTEVNVAAEPALLEQALGNLLDNAIDFTPESGCITLSAEVDQEHVTLKVLDTGSGILTTRCTSNCEYRVNSLLLNDGDVYLSAQTAAPATTNGIYNTLTTNELSGSGNFYLHTNVAGSRGDQLVVNNNATGNFKIFVQDTGVSPQSDDAMTLVKTGGGDASFTLGNTGGFVDLGTYEYVLKRRQQQLEPDQ

SEQ ID NO: 60716 - protein, 204 aa, Homo sapiens
  DOMAIN (1)..(202): Fimbrial Usher proteins domain identified by PFam, accession name Usher, E-value=1.6e-64, PFam score of 227.8
MQNSSHSTIHRMSWNDTLDERNSWGMSAGLQSDRPDNGAQVSGNYQHLSSAGEWDISGTYAASDYSSVSSSWSGSFTATQYGAAFHRRSSTNEPRLMVSTDGVADIPVQGNLDYTNHFGIAVVPLISSYQPSTVAVNMNDLPDGVTVAENVIKETWIEGAIGYKSLASRSGKDVNVIIRNASGQFPPLGADIRQDDSGISSSQW

SEQ ID NO: 60717 - protein, 1170 aa, Homo sapiens
  DOMAIN (254)..(272): Gram-negative pili assembly chaperone proteins domain identified by eMATRIX, accession number BL00635C, p-value=1.375e- 18, raw score of 11.13
  DOMAIN (182)..(320): Gram-negative pili assembly chaperone domain identified by PFam, accession name pili_assembly, E-value=5.3e-77, PFam score of 264.2
MDGGQLNISGLVVDNTCETRVDGGNKDGLILLQTATVGEIDAGVLNDTVGAKAKPFSITVDCSKANPNPGSTAKMTFGSVFFGNSKGTLNNDMSINNPSDGVNIALHNIDGSTIKQVQINNPGDVYTKALDATTKSAVYDFKASYVRAVADQTATAGYVKTNTAYTITYHSSSIADIVISGTRVIYKSDQKSVNVRLENKGNNPLLVQSWLDTGDDNAEPGSITVPFTATPPVSRIDAKRGQTIKLMYTASTSLPKDRESVFWFNVLEVPPKPDAEKVANQSLLQLAFRTRIKLFYRPDGLKGNPSEAPLALKWFWSGSEGFVLTMEWIADPSIWAGLITLIVIELVLGIDNLVFIAILAEKLPPKQRDRARVTRAAAGNVNAPVTAGVNLLAETNFARGDPRLLFHIFGGTFSSLRMRLYVKIREMPPHDYQSTLSDYIVVQFDGAGSVNEDPTAQNLKYHITGLENIRVLDCSVNFSISPETQVIDFGKFNLLDIRRHTMSKTFSIKTTKSQNDQCTDGFKVSSSFYTEETLVEEDKALLIGNGLKLRLLDENASPYTFNKYAEYADFTSDMLVYEKTYTAELRSFRHPIEVALDNTVLGGVRATEGQGFKAADIIGMGINGVDAVSELSQAQATGFYGSLLPSPDVHGYKSSEMLYNWVAKDVEPPKFTEVTDVVLITRDNFKEELENKGLGVIHGDVMQQSTPYLSFRGIGETFPGVKALTDMSSDCYAGQVHALMGENGAGKSTLLKILSGNYAPTTGSVVINGQEMSFSDTTAALNAGVAIIYQELHLVPEMTVAENIYLGQLPHKGGIVNRSLLNYEAGLQLKHLGMDIDPDTPLKYLSIGQWQMVEIAKALARNAKIIAFDEPTSSLSAREIDNLFRVIRELRKEGRVILYVSHRMEEIFALSDAITVFKDGRYVKTFTDMQQVDHDALVQAMVGRDIGDIYGWHPRALDEGVICDMFEGHAPYKPRYVLPDYARFLANGSEWLELEGAKDLDDALSLLTILYHHVPSVTSMPVYLGQLDALLQPYVRILTQDEIDVRIKRFWRYLDRTLPDAFMHANIGPSDSPITRAILRADAELKQVSPNLTFIYDPEITPDDLLLEVAKNICECSKPHIANGPVHDKIFTKGGYGIVSCYNSLPLAGGGSTLVRLNLKAIARAQRIAG

SEQ ID NO: 60718 - protein, 517 aa, Homo sapiens
MAKSAECCSSPGAAVLVTRMMLGDNAEACNQHIVWLPPVSINLLLTILLAVVAGTVGCLLRLPSGTMLIPMLAGAVLQSGQLITIELPLFVRGMRGGWTRFMHIDFMTAYLGTSPGGLYSVCVIAQGGNVGDGSHHGDESLGLFSYFAGSASHCACYFNLWSEAYGYCLHAGDRKKCAITLTVSAAIYTNVRGGGGGSKKISRMELRMKKDHKVRAGTVLYHHSRAQRRDALFDKSKSLSFKSRSAIALLKLENKSSGWIQTRIRMGKKNWNTLGEGVCSCRMFLPDANTLAKNSACSAASAVQAADRPDSQEADALEHMAHSRCALGSTLEDPLNLLEIFLRWLMRKIFHVRLLPAVSTPPNCLNQLLPFFLTPVNYLPGQVMHFKEPLQTEEELLKQQASNLHEQCKAGVIFAAEEVITPLTPVLRTSSASRTSLSSRHQSAPGATVLYKGEKMVLNLVDSRGSPVETYYIILDKKDAREIDIFLRQCRSQNLGLIKPLYEHEYLFVKGLGQHEP

SEQ ID NO: 60719 - protein, 551 aa, Homo sapiens
  DOMAIN (126)..(142): PILI CHAPERONE SIGNATURE domain identified by eMATRIX, accession number PR00969D, p-value=6.063e-17, raw score of 14.93
  DOMAIN (40)..(155): Gram-negative pili assembly chaperone domain identified by PFam, accession name pili_assembly, E-value=1.9e-30, PFam score of 106.5
MTAALAWYCWARKYMPAWVAMLRCNPIAHTVRITANDQVTSLGIENQSDKLPYLAYSWIENEKGEKSDALLVALPPIQRLEPKATSQVRVVKQASTTQLPGDRETLFFYNMREIPPAPDKSSDHAILQVAIQSRIKLFWRPAALRKKAGEKVELQLQSAMPLNCYFGTSGGAVEKSEAIHPFAVPGNAKPGDKIWESDDIKIPVYCDNNTNGNFESEHVYAWVNPYPGVQDRYYQLGVTYNGVDYDASLGKSRIDTNQCIDSKNIDIYTPEQIIAMGWQNKICSGDPANIHMSRTFLARMRLYVKIREMPPHDYQSTLSDYIVVQFDGAGSVNEDPTAQNLKYHITGLENIRVLDCSVNFSISPETQVIDFGKSNLLDIRRHTMSKTFSIKTTKSLNDQCTDGFKAILGCMIAQNLTGSILTTLAVNWPIVLAILLVTLLSSAIVGWLLVRYSSLPGNTGAWGSSPGGAAAMVAMAQDYGADIRLVAFMQYLRVLFVAGAAVLVTRMMLGDNAEAVNQHIVWFPPVSINLLLTILLAVVAGSVGYAPWKYK

SEQ ID NO: 60720 - protein, 563 aa, Homo sapiens
  DOMAIN (63)..(82): ATP-DEPENDENT CLP PROTEASE ATP-BINDING SUBUNIT SIGNATURE domain identified by eMATRIX, accession number PR00300C, p-value= 2.500e-22, raw score of 10.08
  DOMAIN (2)..(234): Chaperonin clpA/B domain identified by PFam, accession name clpA_B, E-value=7.7e-77, PFam score of 268.7
MNKEILAVVEAVSNEKALPREKIFEALESALATATKNKYEQEIDVRGGLLTDAVIKHPHAVLLLDEIEKAHPDVFNILLQVMDNGTLTDNNGRKADFRNVVLVMTTNAGVRETERKSIGLIHQDNSTDAMEEIKKIFTPEFRNRLDNIIWFDHLSTDVIHQVVDKFIVELQVQLDQKGVSLEVSQEARNWLAEKGYDRAMGARPMARVIQDNLKKPLANELLFGSLVDGGQYFLAGLRERHQFDMKLNEPEDHIGSLLYDGCVVGGEWSPDRMRRIAGMAPFSVSPVFHCPFLLMHHLHIYPDLRTMFHRLLIATVVGILAAFAVAGFRHAMLLLEWLFLNNDSGSLVNAATNLSPWRRLLTPALGGLAAGLLLMGWQKFTQQRPHAPTDYMEALQTDGQFDYAASLVKSLASLLVVTSGSAIGREGAMILLAALAASCFAQRFTPRQEWTLWIACGAAAGMAAAYRAPLAGSLFIAEVLFGTMMLASLGPVIISAVVALLVSNLINHSDALSTTYTLSDGQVVICLIAEFGYLTMLPIGELRKNGYTLPSIVMGLRSNHFRL

SEQ ID NO: 60721 - protein, 32 aa, Homo sapiens
  misc_feature (1)...(32): Xaa = X or * as defined in Table 2
XRGPSYPPADRASSRYGILHAPERPECRDLTX

SEQ ID NO: 60722 - protein, 1065 aa, Homo sapiens; identical to SEQ ID NO: 60018
  DOMAIN (32)..(104): Glycosyl hydrolases family 31 domain identified by PFam, accession name Glyco_hydro_31, E-value=7.7e-18, PFam score of 62.4

SEQ ID NO: 60723 - protein, 318 aa, Homo sapiens
  DOMAIN (1)..(281): Glycosyl hydrolases family 31 domain identified by PFam, accession name Glyco_hydro_31, E-value=5e-75, PFam score of 257.7
MWNWKWNSENYPQLDSRIKQWNQEGVQFLAYINPYVASDKDLCEEAAQHGYLAKDASGGDYLVEFGEFYGGVVDLTNPEAYAWFKEVIKKNMIELGCGGWMADFGEYLPTDTYLHNGVSAEIMHNAWPALWAKCNYEALEETGKLGEILFFMRAGSTGSQKYSTMMWAGDQNVDWSLDDGLASVVPAALSLAMTGHGLHHSDIGGYTTLFEMKRNQRSCCCAGNRPGDNWQFDGDAETIAHFARMTTVFTTLKPYLKEAVALNAKSGLPVMRPLFLHYEDDGTEPSVQLAYDERAPAGTYCVRYSTDVYQTREREQQE

SEQ ID NO: 60724 - protein, 496 aa, Homo sapiens
  DOMAIN (51)..(65): w LOW TRANSPOSASE SAPA 12K domain identified by eMATRIX, accession number DM00475A, p-value=4.900e-11, raw score of 16.26
  DOMAIN (36)..(88): Transposase domain identified by PFam, accession name Transposase_8, E-value=0.047, PFam score of 7.7
MVLDSFNGEIPLNGLSARLVIGEQMIDVLGPEKRRRRTTQEKIAIVQQSFEPGMTVSLVARQHGVAASQLFLWRMNGNNGNSSEVHYRDYTLPDVPKPNTVSVTSGSDEAGGSMNNLNGYVVGTNVYGSAGKLKVHNASMNGVEINTGFTAVEGSNLTDADAITSTSVVWTAKGSTDASGNVDVTMSHNAYTDVATDASVNDIAKALDAGYTNNELFTSLNVGTTAELNSALKQVSGSQATTVFREARVLSNRFSMLADAAPKVGNGLAFNVVAKGDPRAELGNNTEYDMLALRKTIDLSESQTMSLEYGIARLHGDGAQKAGDNGVTGGYSQFFGLKHQMSFDNGMNWNNALRYDVHNLDSSRSIAFGNTNKTADTDVKQQYLEFRSEGAKTFEPSEGLKVTPYAGVKLRLTLEQRNKEKERSRGARTKEGNDEHAEEALQGERDTRAREGKTGTRSRKREGRRKEEEGEGAKRQEHERKEKRREKEILHRRLIV

SEQ ID NO: 60725 - protein, 1309 aa, Homo sapiens
  DOMAIN (1055)..(1079): FLAGELLIN SIGNATURE domain identified by eMATRIX, accession number PR00207C, p-value=7.158e-23, raw score of 14.45
  DOMAIN (973)..(1113): Bacterial flagellin N-terminus domain identified by PFam, accession name Flagellin_N, E-value=4.4e-78, PFam score of 272.8
MRRRHLGTNTRLTFRNDRIEETGNVNALFLQLTGKFLRHYRITKHDRNNGVIGSRQGKARRRHLLTELTRVRPQTVTHSLPAFDISSTLMDAATMAGASELENRRCININVDWSAFITMHRTIVNYGTICTFGVCQSGNEYNNTDDFTSLIYTGGDTITRSGETVTLNKSAAVTDKLAGNVVNSGTLSGDQITVSSGLLENTSGGIINNLVKLDKGAVIKNAGVMTNNVDVSGGILNNAGEMTAQITMNAGADSSLVNNTGTINKIVQNAGVFNNSGSVTGRMMSAGGVFNNQTDGAIMRGAALTAFNSRGEFILDNDKNAVHINQSGTLYNTGHMNISNSSHNGAVNMWGGNGRFINDGTIDVSAKSLVVSANNAGDQNAFFWNQDNGVINFDHDSATTLLPRMTASFAARGVDERRWMRFGCATRPIPNLPEARASRMCSSPETGLSLETAAKLSEVMPGAGGRSCLERYEYAKHGACFGFDPDAYFGTMVRLNQEIKESERGKFLADNYGKTVSRRDFDAAFAKSWGKENVKAVKLTCQGNPAYLTEIQISIKADAINAPLSANSFLPQPHPEDALASSLRKISNFSWFSLFTFAAKLFRFVCGNNHGRSILHPDRMSDYGGDYRHGCPLPRKPLLTIILFPPASHSPDLKPPSAPPLRFVHRVPESPYGTPLHVFRKSHIPGRPLQTAYSGVEVIGIQSEKLSRYLERLHTAGLNVTRVLPDGCYLPWEVDSWTLVNQQTSWLIRSAAHAFNELDEHWLQHLAAQFPPENMLCYGVVPHGVAAANPLIQHPEIPSLSLYSADIAFQRYDMLHGIFRKQKTVSKSGKWLARLAVSCLVLAILSFVGSRSIALWHTLKIEDQLQQQQQETWQRYFPQIKRTHNFRFYFKQQLAQQYPEAVPLLYHLQTLLLEHPELQLMEANYSQKQKSLTLKMSAKSEANIDRFCELTQSWLPMDKTEKDPNQSALSSSIERLSSGLRINSAKDDAAGQSIANRFTSNIKGLTQAARNANDGISVAQTTEGALSEINNNLQRVRELTVQATTGTNSESDLSAIQDEIKSRLDEIDRVSGQTQFNGVNVLAKNGSMKIQVGANDNQTITIDLKQIDAKTLGLDGFSVKTNDTVTTSAPVTAFGATTTNNIKLTGITLSTEAATDTGGTNPASIEGVYTDNGNDYYAKITGGDNDGKYYAVTVANDGTVTMATGATANATVTDANTTKATTITSGGTPVQIDNTAGSATANLGAVSLVKLQDSKGNDTDTYALKDTRRFAKYVAAFWRIASSSSRSASWRLRRAISVDISSSRSEDVC

SEQ ID NO: 60726 - protein, 1098 aa, Homo sapiens
  DOMAIN (753)..(778): ACRIFLAVIN RESISTANCE PROTEIN FAMILY SIGNATURE domain identified by eMATRIX, accession number PR00702E, p-value=6.108e- 25, raw score of 7.83
  DOMAIN (669)..(927): AcrB/AcrD/AcrF family domain identified by PFam, accession name ACR_tran, E-value=5.3e-116, PFam score of 398.8
MAALPYMQLYIADYLADTMHLSAEEHGAYLLLMFNYWQTGKPIPKNRLAKIARLTNERWADVEPSLQEFFCDNGEEWVHLRIEEDLASVREKLTKKSAAGKASVQARRSRKEADVQTKQERNLTGVQTDVEVVFEHDVNTKATNKDTDKDLKTDPPLNPPRGNRGVKKFDPLDITLPNWISVSLWLSANNAGDQNAFFWNQDNGVINFDHDSASAVKVTHSNFIAQNDGIMNISGTGAVAMEGDKNAQLVNNGTINLGTAGTTDTGMIGMQLDANATADAVIENNGTINIFANDSFAFSVLGTVGHVVNNGTVVIADGVTGSGLIKQGDSINVEGMNGNNGNSSEVHYGDYTLPDVPKPNTVSVTSGSDEAGGSMNNLNGYVVGTNVNGSAGKLKVNNASMNGVEINTGFTAGYGRHHLEGSNLTDADAITSTSVVWTAKGSTDASGNVDVTMSKNAYTDVATDASVNDIAKALDAGYTNNELFTSLNVGTTAELNSALKQVSGSQATTGFREARVLSNRFSMLADAAPEGGNGLAFNVVAKGDPRAELGNNTEYDMLALRKTIDLSESQTMSLEYGIARLDGDGAQKAGDNGVTGGYSQFFGLKHQMSFDNGMNWNNALRYDVHNLDSSRSIAFGNTNKTADTDVKQQYLEFRSEGAKTFEPSEPDGNAKPAILLMIRKLPEANIIQTDRSPTIRASLEEVEQTLIISVALVILVVFLFLRSGRATIIPAVSVPVSLIGTFAAMYLCGFSLNNLSLMALTIATGFVVDDAIVVLENIARHLEAGMKPLQAALQGTREVGFTVLSMSLSLVAVFLPLLLMGGLPGRLLREFAVTLSVAIGISLLVSLTLTPMMCGWMLKASKPREQKRLRGFGRMLVALQQGYGKSLKWVLNHTRLDFMKIIRDDPAVDNVTGFTGGSRVNSGMMFIPVPRLILALTHRASSDGESGHLRPPKRITLPIPSLRLQYARLPSVTFSTTSIGILAEVIPPIGPTAFTWPHPAKKTFYPGPRNNGQKNDEERVTARAGPDHSRTTRPDHNTHPGPGEQETAVDLLGTISRWSSRYFGNDPCTSSTARKPFALRTPIHQAASPRLLRFFSPS

SEQ ID NO: 60727 - protein, 436 aa, Homo sapiens
  DOMAIN (12)..(56): Glycosyl hydrolases family 31 proteins domain identified by eMATRIX, accession number BL00129D, p-value=1.267e-10, raw score of 16.76
  DOMAIN (20)..(164): Glycosyl hydrolases family 31 domain identified by PFam, accession name Glyco_hydro_31, E-value=6.7e-43, PFam score of 148.0
MRTGSTASQYTSPMMWAGDHDIGGYTTLFEMKRSKELLLRWCDFSAFTPMMRTHEGNRPGDNWQFDGDAETIAHFARMTTVFTTLKPYLKEARRAECEVRPADDAHTYTLKYQYLLGRDILVAPVHEEGRSDWTLYLPEDNWVHAWTGEAFRGGEVTVNAPIGKPAESPKESGLIWCSSALWEPCGRGSEGNSSHNGAVNMWGGNGRFINDGTIDVSAKSLVVSANNAGDQNAFFWNQDNGVINFDHDSASAVKVTHSNFIAQNDGIMNISGTGAVAMEGDKNAQLVNNGTINLGTAGTTDTGMIGMQLDANATADAVIENNGTINIFANDSFAFSVLGTVGHVVNNGTVVIADGVTGSGLIKQGDSINVEGMNGNNGNSSEVHYGDYTLPDVPKPNTVSVTSGSDEAGGRMNKLKGYVVGTTLTEGRELNVNKAG

SEQ ID NO: 60728 - protein, 240 aa, Homo sapiens
  DOMAIN (32)..(48): MAJOR SIGMA-70 FACTOR SIGNATURE domain identified by eMATRIX, accession number PR00046D, p-value=8.627e-09, raw score of 9.85
  DOMAIN (31)..(60): Bacterial regulatory proteins, crp family domain identified by PFam, accession name crp, E-value=0.053, PFam score of 11.1
MTINDSAISEQGMCEEEQVARIAWFYYHDGLTQSEISDRLGLTRLKVSRLLEKGHQSGIIRVQINSRFEGCLEYETQLRRQFSLQHVRVIPGLADLDVGGRLGIGAAHMLMSLLQPQQMLAIGFGEATMNTLQRLSGFISSQQIRLVTLSGGVGSYMTGIGQLNAACSVNIIPAPLRASSADIARTLKNENCVKDVLLAAQRADAAIVGIGAVSQQDDATIIRSGYISQSEQLMIGPKRA

SEQ ID NO: 60729 - protein, 158 aa, Homo sapiens
  DOMAIN (5)..(29): DEAD-box subfamily ATP-dependent helicases proteins domain identified by eMATRIX, accession number BL00039C, p-value=6.906e- 15, raw score of 15.63
  DOMAIN (3)..(81): DEAD/DEAH box helicase domain identified by PFam, accession name DEAD, E-value=2.9e-20, PFam score of 67.0
MYKNLQCLVIDEADRIFDVGFEEELKQIIKLLPTRRQTMLFSATQTRKVEDLARISLKKEPLYVGVDDDKANATVDGLEQKNRKKKLMVFFSSCMSVKYHYELLNYIDLPVLAIHGKQKQNKRTTTFFQFCNADSGTLLCTDVAARGLDIPEVDWIVH

SEQ ID NO: 60730 - protein, 168 aa, Homo sapiens
  DOMAIN (115)..(161): DEAD-box subfamily ATP-dependent helicases proteins domain identified by eMATRIX, accession number BL00039D, p-value=2.000e- 26, raw score of 21.67
  DOMAIN (19)..(138): DEAD/DEAH box helicase domain identified by PFam, accession name DEAD, E-value=7.2e-25, PFam score of 81.5
MGGSNRSAEAWKLANGINIIVATSGRLLDHMQNTPGFMYKNLQCLVIDEADRILDVGFEEELKQIIKLLLTHRQTMLFSATQTQKVEDLARISLKKEPLYVGDDDDNANETVFGTLLCTDVAARGLDITEVDCIVQYDPPDDPKEYIHSVGRTARGLNGRENWVFFAT

SEQ ID NO: 60731 - protein, 892 aa, Homo sapiens
  DOMAIN (379)..(425): DEAD-box subfamily ATP-dependent helicases proteins domain identified by eMATRIX, accession number BL00039D, p-value=7.750e- 31, raw score of 21.67
  DOMAIN (82)..(293): DEAD/DEAH box helicase domain identified by PFam, accession name DEAD, E-value=2.5e-68, PFam score of 219.0
MEKFFRILSFKTKDTKKAKTENKGKSEEESAETTKETENNVEKPDNDEDESEVPSLPLGLTGAFEDTSFASLCNLVNENTLKAIKEMGFTNMTEIQHKSIRPLLEGRDLLAAAKTGSGKTLAFLIPAVELIVKLRFMPRNGTGVLILSPTRELAMQTFGVLKELMTHHVHTYGLIMGGSNRSAEAQKLGNGINIIVATPGRLLDHMQNTPGFMYKNLQCLVIDEADRILDVGFEEELKQIIKLLPTRRQTMLFSATQTRKVEDLARISLKKEPLYVGVDDDKANATVDGLEQGYVVCPSEKRFLLLFTFLKKNRKKKLMVFFSSCMSVKYHYELLNYIDLPVLAIHVSDDDELIENRGKQKQNKRTTTFFQFCNADSGTLLCTDVAARGLDIPEVDWIVQYDPPDDPKEYIHRVGRTARGLNGRGHALLILRPEELGFLRYLKQSKLEKLIEKNYFLHKSAQEAYKSYIRAYDSHSLKQIFNVNNLNLPQVALSFGFKVMYRKEQREGSVLSTVSDIHWGSRNVSLEDKGELPYSLGAVCDCSGRMVQARDKRQPDLTSLARFRYEGASYWYHVQRQCSGQCPGAECSVHGTGLRASYVKNLLPYSSRYRGSSQTVSQSGLWHTGFLTVWISWNSGEQTWALESGPVLQHLPKNGRNENTRIRCTVRPSQILETRPNDTIIRNIRKRGRSRGLSAVHSGQLLRRGRLRLSEQQLVILDLPLLAGERYRGFILSSLRKERSECRGRVGQTRDPVMPRACAEGDVERGVGLRLLRLRTKCPLHFQRRLPAALEGQSYPDATVVSRQPWEGQSYPDATVVSRQPWEGQSYPDATAELPFPPCCPQGRLLVSSDAGRRNPPAPESLARTRPGGAGAKTQRMWPPSLVTDGYQGGFG

SEQ ID NO: 60732 - protein, 356 aa, Homo sapiens
  DOMAIN (41)..(67): DEAD-box subfamily ATP-dependent helicases proteins domain identified by eMATRIX, accession number BL00039B, p-value=8.744e- 12, raw score of 19.19
  DOMAIN (3)..(118): DEAD/DEAH box helicase domain identified by PFam, accession name DEAD, E-value=1.5e-25, PFam score of 83.7
MAEIQHKTIRPLLEGRDLLAAVKTGSGKTLAVLIPAIELVVKLKFMPRNGTGVLILSPTRQLAMQTFGVLKELMTHHVHTYGLIIGGSNRSAEAQKLANGINIIVVTPGRLLDHTQNTPGFMYKNLQVEDLARISPKKEPLYVGVDEDKANATVDGLEQGHFVCPSEKRYLLLFTFLKKNQKKKLMVFFSACMSVKYPYGLLKYIDLLSWPFMESKSKISIQPHSSSTATQIQEHYCSQLEKLIEKNYFLHKSAQETYKSYIRAYDSYSLKQIFNINNLNLPHIALSFGFKLPPFVDLNMNSNEGKQKKQGGFGYQKTKKVEKSIIFKHISKKSSAAGSSLTQEMPVFILNNFVLT

SEQ ID NO: 60733 - protein, 116 aa, Homo sapiens
  DOMAIN (37)..(116): Helicases conserved C-terminal domain identified by PFam, accession name helicase_C, E-value=5.3e-07, PFam score of 36.7
GYVVCPSEKRFLLLFTFLKKNRKKKLMVFFSSCMSVKYHYELLNYIDLPVLAIHVSDDDELIENRGKQKQNKRTTTFFQFCNADSGTLLCTDVAARGLDIPEVDWIVQYDPPDDPK

SEQ ID NO: 60734 - protein, 237 aa, Homo sapiens
  DOMAIN (41)..(67): DEAD-box subfamily ATP-dependent helicases proteins domain identified by eMATRIX, accession number BL00039B, p-value=8.744e- 12, raw score of 19.19
  DOMAIN (3)..(118): DEAD/DEAH box helicase domain identified by PFam, accession name DEAD, E-value=1.5e-25, PFam score of 83.7
  misc_feature (1)...(237): Xaa = X or * as defined in Table 2
MAEIQHKTIRPLLEGRDLLAAVKTGSGKTLAVLIPAIELVVKLKFMPRNGTGVLILSPTRQLAMQTFGVLKELMTHHVHTYGLIIGGSNRSAEAQKLANGINIIVVTPGRLLDHTQNTPGFMYKNLQVEDLARISPKKEPLYVGVDEDKANATVDGLEQGHFVCPSEKRYLLLFTFLKKNQKKKLMVFFSACMSVKYPYGLLKYIDLPVLAIHGKQKQNKHTTTFFXYCNADSGTLL

SEQ ID NO: 60735 - protein, 109 aa, Homo sapiens
  misc_feature (1)...(109): Xaa = X or * as defined in Table 2
VTFYSSEHSNPCHKNLRKARRKDTKRIILKWXHTLVXGRDIXNXNIIITRNTRYSLLCPWATKKLKACFISQKXKRDVIERNSAQCLQPKSIYTLVRXVQILKSTKILL

SEQ ID NO: 60736 - protein, 663 aa, Homo sapiens
  DOMAIN (173)..(212): DEAD-box subfamily ATP-dependent helicases proteins domain identified by eMATRIX, accession number BL00039A, p-value=2.000e- 25, raw score of 18.44
  DOMAIN (167)..(380): DEAD/DEAH box helicase domain identified by PFam, accession name DEAD, E-value=1.6e-64, PFam score of 207.0
  misc_feature (1)...(663): Xaa = X or * as defined in Table 2
KFQGASNLTLSETQNGDVSEETMGSRKVKKSKQKPMNVGLSETQNGGMSQEAVGNIKVTKSPQKSTVLTNGEAAMQSSNSESKGKMKKKRKMVNDAEPDTKKAKTENKGKSEEESAETTKETENNVEKPDNDEDESEVPSLPLGLTGAFEDTSFASLCNLVNENTLKAIKEMGFTNMTEIQHKSIRPLLEGRDLLAAAKTGSGKTLAFLIPAVELIVKLRFMPRNGTGVLILSPTRELAMQTFGVLKELMTHHVHTYGLIMGGSNRSAEAQKLGNGINIIVATPGRLLDHMQNTPGFMYKNLQCLVIDEADRILDVGFEEELKQIIKLLPTRRQTMLFSATQTRKVEDLARISLKKEPLYVGVDDDKANATVDGLEQGYVVCPSEKRFLLLFTFLKKNRKKKLMVFFSSCMSVKYHYELLNYIDLPVLAIHGKQKQNKRTTTFFQFCNADSGTLLCTDVAARGLDIPEVDWIVQYDPPDDPKEYIHRVGXEQPEGLNGEEGHALASFLRPRKDLGFFFRLLXKHSKGFPLSGIWTFSWSLKISDIQFSAWRNWIGKVITFLHKSAQEAYKSYITEPMDSPFLXNRSFNVNNLNLASGLLCQFGFKVPPFVDLNVNSNEGKQKKRGGGGGFGLPRKTQEKLEKSKIFXTHXARKSSGQAGQFSH
